(19) United States
(12) Patent Application Publication
(10) Pub. No.: US 2005/0123551 A1
(43) Pub. Date: Jun. 9, 2005

(54) Compositions and methods relating to endometrial specific genes and proteins

(76) Inventors: Yongming Sun, Redwood City, CA (US); Chenghua Liu, San Jose, CA (US)

Correspondence Address: LICATA & TYRRELL P.C., 66 E. MAIN STREET, MARLTON, NJ, 08053, US

(21) Appl. No.: 10/499,353

(22) PCT Filed: Dec. 20, 2002
(86) PCT No.: PCT/US02/41413

Related U.S. Application Data
(60) Provisional application No. 60/342,751, filed on Dec. 21, 2001.

(51) Int. Cl. C12Q 1/68; G01N 33/574; C07H 21/04; A61K 48/00

(52) U.S. Cl. 424/185.1; 514/44; 536/23.2; 530/350; 530/388.8; 435/6; 435/69.1; 435/320.1; 435/325; 435/7.23

(57) ABSTRACT

The present invention relates to newly identified nucleic acid molecules and polypeptides present in normal and neoplastic endometrial cells, including fragments, variants and derivatives of the nucleic acids and polypeptides. The present invention also relates to antibodies to the polypeptides of the invention, as well as agonists and antagonists of the polypeptides of the invention. The invention also relates to compositions containing the nucleic acid molecules, polypeptides, antibodies, agonists and antagonists of the invention and methods for the use of these compositions. These uses include identifying, diagnosing, monitoring, staging, imaging and treating endometrial cancer and non-cancerous disease states in endometrial, identifying endometrial tissue, monitoring and identifying and/or designing agonists and antagonists of polypeptides of the invention. The uses also include gene therapy, production of transgenic animals and cells, and production of engineered endometrial tissue for treatment and research.

[0001] This application claims the benefit of priority from U.S. Provisional Application No. 60/342,751, filed Dec. 21, 2001, which is herein incorporated by reference in its entirety.

### FIELD OF THE INVENTION

[0002] The present invention relates to newly identified nucleic acids and polypeptides present in normal and neoplastic endometrial cells, including fragments, variants and derivatives of the nucleic acids and polypeptides. The present invention also relates to antibodies to the polypeptides of the invention, as well as agonists and antagonists of the polypeptides of the invention. The invention also relates to compositions comprising the nucleic acids, polypeptides, antibodies, post translational modifications (PTMs), variants, derivatives, agonists and antagonists of the invention and methods for the use of these compositions. These uses include identifying, diagnosing, monitoring, staging, imaging and treating endometrial cancer and non-cancerous disease states in endometrial, identifying endometrial tissue and monitoring and identifying and/or designing agonists and antagonists of polypeptides of the invention. The uses also include gene therapy, therapeutic molecules including but limited to antibodies or antisense molecules, production of transgenic animals and cells, and production of engineered endometrial tissue for treatment and research.

### BACKGROUND OF THE INVENTION

[0003] Endometrial carcinoma (EC) is the foremost invasive neoplasm of the female pelvic genitalia in the United States. C. Paul Morrow & John P. Curtin, Etiology and Detection of Gynecologic Cancer, in Synopsis of Gynecologic Oncology 3 (C. Paul Morrow & John P. Curtin eds., 5th ed. 1998) [hereinafter Morrow & Curtin I]. Nearly 35,000 new cases were estimated for 1997, which is roughly the number of cases of cervical cancer and ovarian cancer combined. Id. EC occurs predominantly in post-menopausal women, with an average diagnosis age of 58 years; only 2 to 5 percent of cases are diagnosed in women under 40. Id. White women have a higher risk of EC than black women, with respective lifetime risks of 2.4 and 1.3. Id. Uterine sarcomas are far less common than carcinomas, accounting for only 4.3% of all uterine cancers. Id. at 5.

[0004] A number of risk factors have been associated with EC, foremost among them being excess estrogen, whether exogenously or endogenously derived. Chen, L. M. et al., Oncology 13(12): 1665-70 (1999); Greven, K. M. & Corn, B. W., Curr. Probl. Cancer 21(2): 65-127 (1997). Other factors include obesity, late menopause, and radiation therapy. Morrow & Curtin I, supra at 4. Those patients with a history of breast, colon, or ovarian cancer, or a family history of EC, polycystic ovarian disease, hormonally active stromal tumors of the ovary, or hypothyroidism, all display an elevated risk of developing EC. Id. at 3-4. Factors which the reduce the risk of EC include combination oral contraceptives and curiously, smoking. Id. at 4.

[0005] From the standpoint of molecular biology, research has revealed an association between EC and a number of genetic mutations, including mutations in the K-ras and ERBB-2 protooncogenes, and the p53 tumor suppressor gene. Jeff Boyd, Molecular Genetics of Gynecologic Cancers, in Synopsis of Gynecologic Oncology 524-26 (C. Paul Morrow & John P. Curtin eds., 5th ed. 1998). Moreover, nearly all of the inherited endometrial cancers (no more than 5% of all cases), arise in the context of hereditary nonpolyposis colorectal cancer, which itself arises from mutations in the hMSH2, the hMLH1, or the hPMS2 genes. Id. at 519-20.

[0006] At present, no adequate mass screening techniques exist for detecting the presence of EC, and only 1 to 5% of women are diagnosed while asymptomatic. Morrow & Curtin I, supra at 10; C. Paul Morrow & John P. Curtin, Tumors of the Endometrium, in Synopsis of Gynecologic Oncology 157 (C. Paul Morrow & John P. Curtin eds., 5th ed. 1998) [hereinafter Morrow & Curtin II]. Current screening techniques are directed to those women who are symptomatic or fall into particularly high-risk categories, such as women who experience post-menopausal bleeding, a symptom experienced by more than 90% of post-menopausal women diagnosed with EC. Morrow & Curtin I, supra at 10; Morrow & Curtin II, supra at 157. For such women, endometrial biopsy is the routine course for diagnosis. Morrow & Curtin I, supra at 10; Walter J. Burdette, Cancer: Etiology, Diagnosis, and Treatment 162 (1998). The use of ultrasound to measure endometrial thickness has served as an effective complement to biopsy. Morrow & Curtin I, supra at 10. In cases where the endometrial “stripe” is greater than 10 mm in thickness, between 10 and 20% of patients experience carcinoma or hyperplasia, and thus should have an endometrial biopsy. Id. In some cases, cervical cytology leads to a diagnosis of EC, particularly where (1) a multitude of histiocytes are discovered in a postmenopausal smear, (2) endometrial cells with a “normal” appearance are found during the latter half of the menstrual cycle or after menopause, and (3) unusual or malignant glandular cells are discovered at any age. Id. at 10-11. While EC is commonly diagnosed at an early stage, and is thus considered among the most curable of the gynecologic cancers, those women who present at later stages or with unfavorable histologies suffer considerable morbidity and death. Yamada, S. D & McGonigle, K. F., Curr. Opin. Obstet. Gynecol. 10(1): 57-60 (1998).

[0007] Once EC has been diagnosed, the EC is surgically staged, which typically includes a hysterectomy and bilateral salpingo-oophorectomy. Chen et al., supra. One classification system commonly used to stage EC is the TNM system devised by the Union Internationale Contre le Cancer. AJCC Cancer Staging Handbook 3 (Irvin D. Fleming et al. eds., 5^{th} ed. 1998). This system is divided into several stages, each of which evaluates the extent of cancer growth with respect to primary tumor (T), regional lymph nodes (N), and distant metastasis (M). Id.

[0008] Stage 0 is characterized by carcinoma in situ (Tis), with no regional lymph node metastasis (N0) and no distant metastasis (M0). Id. at 184. Stages IA, IB, IC, IIA, and IIB differ from Stage 0 only in terms of tumor category. Id. at 184-85. Stage IA involves a tumor limited to the endometrium (T1a), StageIB is characterized by tumor invasion up to one-half of the myometrium (T1b), and Stage IC involves tumor invasion into more than one-half of the myometrium (T1c). Id. By contrast, Stage IIA involves invasion of the endocervical glands only (T2a), while Stage IIB involves invasion of the cervical stroma (T2b). Id. Stages IIIA and IIIB also differ from Stage 0 only with respect to tumor stage, with Stage IIIA being characterized by invasion into the serosa and/or adnexa (directly or by metastasis), and/or cancer cells being present in ascites or peritoneal washings (T3a), and with Stage IIIB involving the vagina (directly or by metastasis) (T3b). Id. Stage IIIC, however, involves any one of tumor categories T1, T2, T3a, T3b, regional lymph node metastasis (N1), but no distant metastasis (M0). Id. Stage IVA involves tumor invasion into the bladder mucosa and/or bowel mucosa (T4), any N category, but no distant metastasis (M0). Id. Lastly, stage IVB is characterized by any T category, any N category, and distant metastasis (M1). Id.

[0009] Turning to the treatment of EC, complete abdominal hysterectomy and bilateral salpingo-oophorectomy have been described as the “cornerstones” of EC therapy. Greven & Corn, supra. Aside from surgery, irradiation is highly effective at treating EC, either alone or as part of an adjuvant regimen; indeed, some women who are unable to undergo conventional surgery are cured with radiation alone. Id.; Greven, K. M. et al., Int'I J. Radiat. Oncol. Biol. Phys. 39(2): 413-18 (1997). Physicians have also observed some positive responses to chemotherapy, with cisplatin, doxorubicin, paclitaxel, and progestins serving as the most effective systemic agents. Greven & Corn, supra; Chen et al., supra; Augustin A. Garcia & J. Tate Thigpen, Principles of Chemotherapy, in Synopsis of Gynecologic Oncology 427-29 (C. Paul Morrow & John P. Curtin eds., 5th ed. 1998). However, chemotherapy is generally of limited utility in treating EC, with responses typically being shortlived. Burdette, supra at 163.

[0010] From the foregoing, it is clear that procedures used for detecting, diagnosing, monitoring, staging, prognosticating, and preventing the recurrence of uterine cancer are of critical importance to the outcome of the patient. Moreover, current procedures, while helpful in each of these analyses, are limited by their specificity, sensitivity, invasiveness, and/or their cost. As such, highly specific and sensitive procedures that would operate by way of detecting novel markers in cells, tissues, or bodily fluids, with minimal invasiveness and at a reasonable cost, would be highly desirable.

[0011] Accordingly, there is a great need for more sensitive and accurate methods for predicting whether a person is likely to develop uterine cancer, for diagnosing uterine cancer, for monitoring the progression of the disease, for staging uterine cancer, for determining whether uterine cancer has metastasized, and for imaging uterine cancer. There is also a need for better treatment of uterine cancer.

### SUMMARY OF THE INVENTION

[0012] The present invention solves many needs in the art by providing nucleic acid molecules, polypeptides and antibodies thereto, variants and derivatives of the nucleic acids and polypeptides, agonists and antagonists that may be used to identify, diagnose, monitor, stage, image and treat endometrial cancer and non-cancerous disease states in endometrial; identify and monitor endometrial tissue; and identify and design agonists and antagonists of polypeptides of the invention. The invention also provides gene therapy, methods for producing transgenic animals and cells, and methods for producing engineered endometrial tissue for treatment and research.

[0013] One aspect of the present invention relates to nucleic acid molecules that are specific to endometrial cells, endometrial tissue and/or the endometrial organ. These endometrial specific nucleic acids (ESNAs) may be a naturally occurring cDNA, genomic DNA, RNA, or a fragment of one of these nucleic acids, or may be a non-naturally occurring nucleic acid molecule. If the ESNA is genomic DNA, then the ESNA is a endometrial specific gene (ESG). If the ESNA is RNA, then it is a endometrial specific transcript encoded by a ESG. Due to alternative splicing and transcriptional modification one ESG may encode for multiple endometrial specific RNAs. In a preferred embodiment, the nucleic acid molecule encodes a polypeptide that is specific to endometrial. More preferred is a nucleic acid molecule that encodes a polypeptide comprising an amino acid sequence of SEQ ID NO: 473-666. In another preferred embodiment, the nucleic acid molecule comprises a nucleic acid sequence of SEQ ID NO: 1-472. For the ESNA sequences listed herein, DEX0377_{—}001.nt.1 corresponds to SEQ ID NO: 1. For sequences with multiple splice variants, the parent sequence DEX0377_{—}001.nt.1, will be followed by DEX0377_{—}001.nt.2, etc. for each splice variant. The sequences off the corresponding peptides are listed as DEX0377_{—}001.aa.1, etc. For the mapping of all of the nucleotides and peptides, see the table in the Example 1 section below.

[0014] This aspect of the present invention also relates to nucleic acid molecules that selectively hybridize or exhibit substantial sequence similarity to nucleic acid molecules encoding a endometrial Specific Protein (ESP), or that selectively hybridize or exhibit substantial sequence similarity to a ESNA. In one embodiment of the present invention the nucleic acid molecule comprises an allelic variant of a nucleic acid molecule encoding a ESP, or an allelic variant of a ESNA. In another embodiment, the nucleic acid molecule comprises a part of a nucleic acid sequence that encodes a ESP or a part of a nucleic acid sequence of a ESNA.

[0015] In addition, this aspect of the present invention relates to a nucleic acid molecule further comprising one or more expression control sequences controlling the transcription and/or translation of all or a part of a ESNA or the transcription and/or translation of a nucleic acid molecule that encodes all or a fragment of a ESP.

[0016] Another aspect of the present invention relates to vectors and/or host cells comprising a nucleic acid molecule of this invention. In a preferred embodiment, the nucleic acid molecule of the vector and/or host cell encodes all or a fragment of a ESP. In another preferred embodiment, the nucleic acid molecule of the vector and/or host cell comprises all or a part of a ESNA. Vectors and host cells of the present invention are useful in the recombinant production of polypeptides, particularly ESPs of the present invention.

[0017] Another aspect of the present invention relates to polypeptides encoded by a nucleic acid molecule of this invention. The polypeptide may comprise either a fragment or a full-length protein. In a preferred embodiment, the polypeptide is a ESP. However, this aspect of the present invention also relates to mutant proteins (muteins) of ESPs, fusion proteins of which a portion is a ESP, and proteins and polypeptides encoded by allelic variants of a ESNA as provided herein.

[0018] Another aspect of the present invention relates to antibodies and other binders that 10 specifically binds to a polypeptide of the instant invention. Accordingly antibodies or binders of the present specifically bind to ESPs, muteins, fusion proteins, and/or homologous proteins or a polypeptides encoded by allelic variants of an ESNA as provided herein.

[0019] Another aspect of the present invention relates to agonists and antagonists of the nucleic acid molecules and polypeptides of this invention. The agonists and antagonists of the instant invention may be used to treat endometrial cancer and non-cancerous disease states in endometrial and to produce engineered endometrial tissue.

[0020] Another aspect of the present invention relates to methods for using the nucleic acid molecules to detect or amplify nucleic acid molecules that have similar or identical nucleic acid sequences compared to the nucleic acid molecules described herein. Such methods are useful in identifying, diagnosing, monitoring, staging, imaging and treating endometrial cancer and non-cancerous disease states in endometrial. Such methods are also useful in identifying and/or monitoring endometrial tissue. In addition, measurement of levels of one or more of the nucleic acid molecules of this invention may be useful for diagnostics as part of panel in combination with known other markers, particularly those described in the endometrial cancer background section above.

[0021] Another aspect of the present invention relates to use of the nucleic acid molecules of this invention in gene therapy, for producing transgenic animals and cells, and for producing engineered endometrial tissue for treatment and research.

[0022] Another aspect of the present invention relates to methods for detecting polypeptides this invention, preferably using antibodies thereto. Such methods are useful to identify, diagnose, monitor, stage, image and treat endometrial cancer and non-cancerous disease states in endometrial. In addition, measurement of levels of one or more of the polypeptides of this invention may be useful to identify, diagnose, monitor, stage, image endometrial cancer in combination with known other markers, particularly those described in the endometrial cancer background section above. The polypeptides of the present invention can also be used to identify and/or monitor endometrial tissue, and to produce engineered endometrial tissue.

[0023] Yet another aspect of the present invention relates to a computer readable means of storing the nucleic acid and amino acid sequences of the invention. The records of the computer readable means can be accessed for reading and displaying of sequences for comparison, alignment and ordering of the sequences of the invention to other sequences. In addition, the computer records regarding the nucleic acid and/or amino acid sequences and/or measurements of their levels may be used alone or in combination with other markers to diagnose endometrial related diseases.

### DETAILED DESCRIPTION OF THE INVENTION

Definitions and General Techniques

[0024] Unless otherwise defined herein, scientific and technical terms used in connection with the present invention shall have the meanings that are commonly understood by those of ordinary skill in the art. Further, unless otherwise required by context, singular terms shall include pluralities and plural terms shall include the singular. Generally, nomenclatures used in connection with, and techniques of, cell and tissue culture, molecular biology, immunology, microbiology, genetics and protein and nucleic acid chemistry and hybridization described herein are those well known and commonly used in the art. The methods and techniques of the present invention are generally performed according to conventional methods well known in the art and as described in various general and more specific references that are cited and discussed throughout the present specification unless otherwise indicated. See, e.g., Sambrook et al., Molecular Cloning: A Laboratory Manual, 2d ed., Cold Spring Harbor Laboratory Press (1989) and Sambrook et al., Molecular Cloning: A Laboratory Manual, 3d ed., Cold Spring Harbor Press (2001); Ausubel et al., Current Protocols in Molecular Biology, Greene Publishing Associates (1992, and Supplements to 2000); Ausubel et al., Short Protocols in Molecular Biology: A Compendium of Methods from Current Protocols in Molecular Biology—4^{th} Ed., Wiley & Sons (1999); Harlow and Lane, Antibodies: A Laboratory Manual, Cold Spring Harbor Laboratory Press (1990); and Harlow and Lane, Using Antibodies: A Laboratory Manual, Cold Spring Harbor Laboratory Press (1999).

[0025] Enzymatic reactions and purification techniques are performed according to manufacturer's specifications, as commonly accomplished in the art or as described herein. The nomenclatures used in connection with, and the laboratory procedures and techniques of, analytical chemistry, synthetic organic chemistry, and medicinal and pharmaceutical chemistry described herein are those well known and commonly used in the art. Standard techniques are used for chemical syntheses, chemical analyses, pharmaceutical preparation, formulation, and delivery, and treatment of patients.

[0026] The following terms, unless otherwise indicated, shall be understood to have the following meanings:

[0027] A “nucleic acid molecule” of this invention refers to a polymeric form of nucleotides and includes both sense and antisense strands of RNA, cDNA, genomic DNA, and synthetic forms and mixed polymers of the above. A nucleotide refers to a ribonucleotide, deoxynucleotide or a modified form of either type of nucleotide. A “nucleic acid molecule” as used herein is synonymous with “nucleic acid” and “polynucleotide.” The term “nucleic acid molecule” usually refers to a molecule of at least 10 bases in length, unless otherwise specified. The term includes single and double stranded forms of DNA. In addition, a polynucleotide may include either or both naturally occurring and modified nucleotides linked together by naturally occurring and/or non-naturally occurring nucleotide linkages.

[0028] Nucleotides are represented by single letter symbols in nucleic acid molecule sequences. The following table lists symbols identifying nucleotides or groups of nucleotides which may occupy the symbol position on a nucleic acid molecule. See Nomenclature Committee of the International Union of Biochemistry (NC-IUB), Nomenclature for incompletely specified bases in nucleic acid sequences, Recommendations 1984., Eur J. Biochem. 150(1):1-5 (1985).

| | | | Complementary |
|---|---|---|---|
| Symbol | Meaning | Group/Origin of Designation | Symbol |
| a | a | Adenine | t/u |
| g | g | Guanine | c |
| c | c | Cytosine | g |
| t | t | Thymine | a |
| u | u | Uracil | a |
| r | g or a | puRine | y |
| y | t/u or c | pYrimidine | r |
| m | a or c | aMino | k |
| k | g or t/u | Keto | m |
| s | g or c | Strong interactions 3H-bonds | w |
| w | a or t/u | Weak interactions 2H-bonds | s |
| b | g or c or t/u | not a | v |
| d | a or g or t/u | not c | h |
| h | a or c or t/u | not g | d |
| v | a or g or c | not t, not u | b |
| n | a or g or c | aNy | n |
| | or t/u, | | |
| | unknown, or | | |
| | other | | |

[0029] The nucleic acid molecules may be modified chemically or biochemically or may contain non-natural or derivatized nucleotide bases, as will be readily appreciated by those of skill in the art. Such modifications include, for example, labels, methylation, substitution of one or more of the naturally occurring nucleotides with an analog, internucleotide modifications such as uncharged linkages (e.g., methyl phosphonates, phosphotriesters, phosphoramidates, carbamates, etc.), charged linkages (e.g., phosphorothioates, phosphorodithioates, etc.), pendent moieties (e.g., polypeptides), intercalators (e.g., acridine, psoralen, etc.), chelators, alkylators, and modified linkages (e.g., alpha anomeric nucleic acids, etc.) The term “nucleic acid molecule” also includes any topological conformation, including single-stranded, double-stranded, partially duplexed, triplexed, hairpinned, circular and padlocked conformations. Also included are synthetic molecules that mimic polynucleotides in their ability to bind to a designated sequence via hydrogen bonding and other chemical interactions. Such molecules are known in the art and include, for example, those in which peptide linkages substitute for phosphate linkages in the backbone of the molecule.

[0030] A “gene” is defined as a nucleic acid molecule that comprises a nucleic acid sequence that encodes a polypeptide and the expression control sequences that surround the nucleic acid sequence that encodes the polypeptide. For instance, a gene may comprise a promoter, one or more enhancers, a nucleic acid sequence that encodes a polypeptide, downstream regulatory sequences and, possibly, other nucleic acid sequences involved in regulation of the expression of an RNA. As is well known in the art, eukaryotic genes usually contain both exons and introns. The term “exon” refers to a nucleic acid sequence found in genomic DNA that is bioinformatically predicted and/or experimentally confirmed to contribute contiguous sequence to a mature mRNA transcript. The term “intron” refers to a nucleic acid sequence found in genomic DNA that is predicted and/or confirmed to not contribute to a mature mRNA transcript, but rather to be “spliced out” during processing of the transcript.

[0031] A nucleic acid molecule or polypeptide is “derived” from a particular species if the nucleic acid molecule or polypeptide has been isolated from the particular species, or if the nucleic acid molecule or polypeptide is homologous to a nucleic acid molecule or polypeptide isolated from a particular species.

[0032] An “isolated” or “substantially pure” nucleic acid or polynucleotide (e.g., an RNA, DNA or a mixed polymer) is one which is substantially separated from other cellular components that naturally accompany the native polynucleotide in its natural host cell, e.g., ribosomes, polymerases, or genomic sequences with which it is naturally associated. The term embraces a nucleic acid or polynucleotide that (1) has been removed from its naturally occurring environment, (2) is not associated with all or a portion of a polynucleotide in which the “isolated polynucleotide” is found in nature, (3) is operatively linked to a polynucleotide which it is not linked to in nature, (4) does not occur in nature as part of a larger sequence or (5) includes nucleotides or internucleoside bonds that are not found in nature. The term “isolated” or “substantially pure” also can be used in reference to recombinant or cloned DNA isolates, chemically synthesized polynucleotide analogs, or polynucleotide analogs that are biologically synthesized by heterologous systems. The term “isolated nucleic acid molecule” includes nucleic acid molecules that are integrated into a host cell chromosome at a heterologous site, recombinant fusions of a native fragment to a heterologous sequence, recombinant vectors present as episomes or as integrated into a host cell chromosome.

[0033] A “part” of a nucleic acid molecule refers to a nucleic acid molecule that comprises a partial contiguous sequence of at least 10 bases of the reference nucleic acid molecule. Preferably, a part comprises at least 15 to 20 bases of a reference nucleic acid molecule. In theory, a nucleic acid sequence of 17 nucleotides is of sufficient length to occur at random less frequently than once in the three gigabase human genome, and thus to provide a nucleic acid probe that can uniquely identify the reference sequence in a nucleic acid mixture of genomic complexity. A preferred part is one that comprises a nucleic acid sequence that can encode at least 6 contiguous amino acid sequences (fragments of at least 18 nucleotides) because they are useful in directing the expression or synthesis of peptides that are useful in mapping the epitopes of the polypeptide encoded by the reference nucleic acid. See, e.g., Geysen et al., Proc. Natl. Acad. Sci. USA 81:3998-4002 (1984); and U.S. Pat. Nos. 4,708,871 and 5,595,915, the disclosures of which are incorporated herein by reference in their entireties. A part may also comprise at least 25, 30, 35 or 40 nucleotides of a reference nucleic acid molecule, or at least 50, 60, 70, 80, 90, 100, 150, 200, 250, 300, 350, 400 or 500 nucleotides of a reference nucleic acid molecule. A part of a nucleic acid molecule may comprise no other nucleic acid sequences. Alternatively, a part of a nucleic acid may comprise other nucleic acid sequences from other nucleic acid molecules.

[0034] The term “oligonucleotide” refers to a nucleic acid molecule generally comprising a length of 200 bases or fewer. The term often refers to single-stranded deoxyribonucleotides, but it can refer as well to single-or double-stranded ribonucleotides, RNA:DNA hybrids and double-stranded DNAs, among others. Preferably, oligonucleotides are 10 to 60 bases in length and most preferably 12, 13, 14, 15, 16, 17, 18, 19 or 20 bases in length. Other preferred oligonucleotides are 25, 30, 35, 40, 45, 50, 55 or 60 bases in length. Oligonucleotides may be single-stranded, e.g. for use as probes or primers, or may be double-stranded, e.g. for use in the construction of a mutant gene. Oligonucleotides of the invention can be either sense or antisense oligonucleotides. An oligonucleotide can be derivatized or modified as discussed above for nucleic acid molecules.

[0035] Oligonucleotides, such as single-stranded DNA probe oligonucleotides, often are synthesized by chemical methods, such as those implemented on automated oligonucleotide synthesizers. However, oligonucleotides can be made by a variety of other methods, including in vitro recombinant DNA-mediated techniques and by expression of DNAs in cells and organisms. Initially, chemically synthesized DNAs typically are obtained without a 5′ phosphate. The 5′ ends of such oligonucleotides are not substrates for phosphodiester bond formation by ligation reactions that employ DNA ligases typically used to form recombinant DNA molecules. Where ligation of such oligonucleotides is desired, a phosphate can be added by standard techniques, such as those that employ a kinase and ATP. The 3′ end of a chemically synthesized oligonucleotide generally has a free hydroxyl group and, in the presence of a ligase, such as T4 DNA ligase, readily will form a phosphodiester bond with a 5′ phosphate of another polynucleotide, such as another oligonucleotide. As is well known, this reaction can be prevented selectively, where desired, by removing the 5′ phosphates of the other polynucleotide(s) prior to ligation.

[0036] The term “naturally occurring nucleotide” referred to herein includes naturally occurring deoxyribonucleotides and ribonucleotides. The term “modified nucleotides” referred to herein includes nucleotides with modified or substituted sugar groups and the like. The term “nucleotide linkages” referred to herein includes nucleotides linkages such as phosphorothioate, phosphorodithioate, phosphoroselenoate, phosphorodiselenoate, phosphoroanilothioate, phoshoraniladate, phosphoroamidate, and the like. See e.g., LaPlanche et al. Nucl. Acids Res. 14:9081-9093 (1986); Stein et al. Nucl. Acids Res. 16:3209-3221 (1988); Zon et al. Anti-Cancer Drug Design 6:539-568 (1991); Zon et al., in Eckstein (ed.) Oligonucleotides and Analogues: A Practical Approach, pp. 87-108, Oxford University Press (1991); Uhlmann and Peyman Chemical Reviews 90:543 (1990), and U.S. Pat. No. 5,151,510, the disclosure of which is hereby incorporated by reference in its entirety.

[0037] Unless specified otherwise, the left hand end of a polynucleotide sequence in sense orientation is the 5′ end and the right hand end of the sequence is the 3′ end. In addition, the left hand direction of a polynucleotide sequence in sense orientation is referred to as the 5′ direction, while the right hand direction of the polynucleotide sequence is referred to as the 3′ direction. Further, unless otherwise indicated, each nucleotide sequence is set forth herein as a sequence of deoxyribonucleotides. It is intended, however, that the given sequence be interpreted as would be appropriate to the polynucleotide composition: for example, if the isolated nucleic acid is composed of RNA, the given sequence intends ribonucleotides, with uridine substituted for thymidine.

[0038] The term “allelic variant” refers to one of two or more alternative naturally occurring forms of a gene, wherein each gene possesses a unique nucleotide sequence. In a preferred embodiment, different alleles of a given gene have similar or identical biological properties.

[0039] The term “percent sequence identity” in the context of nucleic acid sequences refers to the residues in two sequences which are the same when aligned for maximum correspondence. The length of sequence identity comparison may be over a stretch of at least about nine nucleotides, usually at least about 20 nucleotides, more usually at least about 24 nucleotides, typically at least about 28 nucleotides, more typically at least about 32 nucleotides, and preferably at least about 36 or more nucleotides. There are a number of different algorithms known in the art which can be used to measure nucleotide sequence identity. For instance, polynucleotide sequences can be compared using FASTA, Gap or Bestfit, which are programs in Wisconsin Package Version 10.0, Genetics Computer Group (GCG), Madison, Wis. FASTA, which includes, e.g., the programs FASTA2 and FASTA3, provides alignments and percent sequence identity of the regions of the best overlap between the query and search sequences (Pearson, Methods Enzymol. 183: 63-98 (1990); Pearson, Methods Mol. Biol. 132: 185-219 (2000); Pearson, Methods Enzymol. 266: 227-258 (1996); Pearson, J. Mol. Biol. 276: 71-84 (1998)). Unless otherwise specified, default parameters for a particular program or algorithm are used. For instance, percent sequence identity between nucleic acid sequences can be determined using FASTA with its default parameters (a word size of 6 and the NOPAM factor for the scoring matrix) or using Gap with its default parameters as provided in GCG Version 6.1.

[0040] A reference to a nucleic acid sequence encompasses its complement unless otherwise specified. Thus, a reference to a nucleic acid molecule having a particular sequence should be understood to encompass its complementary strand, with its complementary sequence. The complementary strand is also useful, e.g., for antisense therapy, double stranded RNA (dsRNA) inhibition (RNAi), combination of triplex and antisense, hybridization probes and PCR primers.

[0041] In the molecular biology art, researchers use the terms “percent sequence identity”, “percent sequence similarity” and “percent sequence homology” interchangeably. In this application, these terms shall have the same meaning with respect to nucleic acid sequences only.

[0042] The term “substantial similarity” or “substantial sequence similarity,” when referring to a nucleic acid or fragment thereof, indicates that, when optimally aligned with appropriate nucleotide insertions or deletions with another nucleic acid (or its complementary strand), there is nucleotide sequence identity in at least about 50%, more preferably 60% of the nucleotide bases, usually at least about 70%, more usually at least about 80%, preferably at least about 90%, and more preferably at least about 95-98% of the nucleotide bases, as measured by any well known algorithm of sequence identity, such as FASTA, BLAST or Gap, as discussed above.

[0043] Alternatively, substantial similarity exists between a first and second nucleic acid sequence when the first nucleic acid sequence or fragment thereof hybridizes to an antisense strand of the second nucleic acid, under selective hybridization conditions. Typically, selective hybridization will occur between the first nucleic acid sequence and an antisense strand of the second nucleic acid sequence when there is at least about 55% sequence identity between the first and second nucleic acid sequences—preferably at least about 65%, more preferably at least about 75%, and most preferably at least about 90%—over a stretch of at least about 14 nucleotides, more preferably at least 17 nucleotides, even more preferably at least 20, 25, 30, 35, 40, 50, 60, 70, 80, 90 or 100 nucleotides.

[0044] Nucleic acid hybridization will be affected by such conditions as salt concentration, temperature, solvents, the base composition of the hybridizing species, length of the complementary regions, and the number of nucleotide base mismatches between the hybridizing nucleic acids, as will be readily appreciated by those skilled in the art. “Stringent hybridization conditions” and “stringent wash conditions” in the context of nucleic acid hybridization experiments depend upon a number of different physical parameters. The most important parameters include temperature of hybridization, base composition of the nucleic acids, salt concentration and length of the nucleic acid. One having ordinary skill in the art knows how to vary these parameters to achieve a particular stringency of hybridization. In general, “stringent hybridization” is performed at about 25° C. below the thermal melting point (Tₘ) for the specific DNA hybrid under a particular set of conditions. “Stringent washing” is performed at temperatures about 5° C. lower than the Tₘ for the specific DNA hybrid under a particular set of conditions. The Tₘ is the temperature at which 50% of the target sequence hybridizes to a perfectly matched probe. See Sambrook (1989), supra, p. 9.51.

[0045] The Tₘ for a particular DNA-DNA hybrid can be estimated by the formula:
Tₘ=81.5° C.+16.6(log₁₀[Na⁺])+0.41(fraction G+C)−0.63 (% formamide)−(600/l) where l is the length of the hybrid in base pairs.

[0046] The Tₘ for a particular RNA-RNA hybrid can be estimated by the formula:
Tₘ=79.8° C.+18.5(log₁₀[Na⁺])+0.58(fraction G+C)+11.8(fraction G+C)²−0.35(% formamide)−(820/l).

[0047] The Tₘ for a particular RNA-DNA hybrid can be estimated by the formula:
Tₘ=79.8° C.+18.5(log₁₀[Na⁺])+0.58(fraction G+C)+11.8(fraction G+C)²−0.50 (% formamide)−(820/l).

[0048] In general, the Tₘ decreases by 1-1.5° C. for each 1% of mismatch between two nucleic acid sequences. Thus, one having ordinary skill in the art can alter hybridization and/or washing conditions to obtain sequences that have higher or lower degrees of sequence identity to the target nucleic acid. For instance, to obtain hybridizing nucleic acids that contain up to 10% mismatch from the target nucleic acid sequence, 10-15° C. would be subtracted from the calculated Tₘ of a perfectly matched hybrid, and then the hybridization and washing temperatures adjusted accordingly. Probe sequences may also hybridize specifically to duplex DNA under certain conditions to form triplex or other higher order DNA complexes. The preparation of such probes and suitable hybridization conditions are well known in the art.

[0049] An example of stringent hybridization conditions for hybridization of complementary nucleic acid sequences having more than 100 complementary residues on a filter in a Southern or Northern blot or for screening a library is 50% formamide/6×SSC at 42° C. for at least ten hours and preferably overnight (approximately 16 hours). Another example of stringent hybridization conditions is 6×SSC at 68° C. without formamide for at least ten hours and preferably overnight. An example of moderate stringency hybridization conditions is 6×SSC at 55° C. without formamide for at least ten hours and preferably overnight. An example of low stringency hybridization conditions for hybridization of complementary nucleic acid sequences having more than 100 complementary residues on a filter in a Southern or northern blot or for screening a library is 6×SSC at 42° C. for at least ten hours. Hybridization conditions to identify nucleic acid sequences that are similar but not identical can be identified by experimentally changing the hybridization temperature from 68° C. to 42° C. while keeping the salt concentration constant (6×SSC), or keeping the hybridization temperature and salt concentration constant (e.g. 42° C. and 6×SSC) and varying the formamide concentration from 50% to 0%. Hybridization buffers may also include blocking agents to lower background. These agents are well known in the art. See Sambrook et al. (1989), supra, pages 8.46 and 9.46-9.58. See also Ausubel (1992), supra, Ausubel (1999), supra, and Sambrook (2001), supra.

[0050] Wash conditions also can be altered to change stringency conditions. An example of stringent wash conditions is a 0.2×SSC wash at 65° C. for 15 minutes (see Sambrook (1989), supra, for SSC buffer). Often the high stringency wash is preceded by a low stringency wash to remove excess probe. An exemplary medium stringency wash for duplex DNA of more than 100 base pairs is 1×SSC at 45° C. for 15 minutes. An exemplary low stringency wash for such a duplex is 4×SSC at 40° C. for 15 minutes. In general, signal-to-noise ratio of 2× or higher than that observed for an unrelated probe in the particular hybridization assay indicates detection of a specific hybridization.

[0051] As defined herein, nucleic acids that do not hybridize to each other under stringent conditions are still substantially similar to one another if they encode polypeptides that are substantially identical to each other. This occurs, for example, when a nucleic acid is created synthetically or recombinantly using a high codon degeneracy as permitted by the redundancy of the genetic code.

[0052] Hybridization conditions for nucleic acid molecules that are shorter than 100 nucleotides in length (e.g., for oligonucleotide probes) may be calculated by the formula:

[0053] Tₘ=81.5° C.+16.6(log₁₀[Na⁺])+0.41(fraction G+C)−(600/N), wherein N is change length and the [Na⁺] is 1 M or less. See Sambrook (1989), supra, p. 11.46. For hybridization of probes shorter than 100 nucleotides, hybridization is usually performed under stringent conditions (5-10° C. below the Tₘ) using high concentrations (0.1-1.0 pmol/ml) of probe. Id. at p. 11.45. Determination of hybridization using mismatched probes, pools of degenerate probes or “guessmers,” as well as hybridization solutions and methods for empirically determining hybridization conditions are well known in the art. See, e.g., Ausubel (1999), supra; Sambrook (1989), supra, pp. 11.45-11.57.

[0054] The term “digestion” or “digestion of DNA” refers to catalytic cleavage of the DNA with a restriction enzyme that acts only at certain sequences in the DNA. The various restriction enzymes referred to herein are commercially available and their reaction conditions, cofactors and other requirements for use are known and routine to the skilled artisan. For analytical purposes, typically, 1 μg of plasmid or DNA fragment is digested with about 2 units of enzyme in about 20 μl of reaction buffer. For the purpose of isolating DNA fragments for plasmid construction, typically 5 to 50 μg of DNA are digested with 20 to 250 units of enzyme in proportionately larger volumes. Appropriate buffers and substrate amounts for particular restriction enzymes are described in standard laboratory manuals, such as those referenced below, and are specified by commercial suppliers. Incubation times of about 1 hour at 37° C. are ordinarily used, but conditions may vary in accordance with standard procedures, the supplier's instructions and the particulars of the reaction. After digestion, reactions may be analyzed, and fragments may be purified by electrophoresis through an agarose or polyacrylamide gel, using well known methods that are routine for those skilled in the art.

[0055] The term “ligation” refers to the process of forming phosphodiester bonds between two or more polynucleotides, which most often are double-stranded DNAs. Techniques for ligation are well known to the art and protocols for ligation are described in standard laboratory manuals and references, such as, e.g., Sambrook (1989), supra.

[0056] Genome-derived “single exon probes,” are probes that comprise at least part of an exon (“reference exon”) and can hybridize detectably under high stringency conditions to transcript-derived nucleic acids that include the reference exon but do not hybridize detectably under high stringency conditions to nucleic acids that lack the reference exon. Single exon probes typically further comprise, contiguous to a first end of the exon portion, a first intronic and/or intergenic sequence that is identically contiguous to the exon in the genome, and may contain a second intronic and/or intergenic sequence that is identically contiguous to the exon in the genome. The minimum length of genome-derived single exon probes is defined by the requirement that the exonic portion be of sufficient length to hybridize under high stringency conditions to transcript-derived nucleic acids, as discussed above. The maximum length of genome-derived single exon probes is defined by the requirement that the probes contain portions of no more than one exon. The single exon probes may contain priming sequences not found in contiguity with the rest of the probe sequence in the genome, which priming sequences are useful for PCR and other amplification-based technologies. In another aspect, the invention is directed to single exon probes based on the ESNAs disclosed herein.

[0057] In one embodiment, the term “microarray” refers to a “nucleic acid microarray” having a substrate-bound plurality of nucleic acids, hybridization to each of the plurality of bound nucleic acids being separately detectable. The substrate can be solid or porous, planar or non-planar, unitary or distributed. Nucleic acid microarrays include all the devices so called in Schena (ed.), DNA Microarrays: A Practical Approach (Practical Approach Series), Oxford University Press (1999); Nature Genet. 21(1)(suppl.):1-60 (1999); Schena (ed.), Microarray Biochip: Tools and Technology, Eaton Publishing Company/BioTechniques Books Division (2000). Additionally, these nucleic acid microarrays include substrate-bound plurality of nucleic acids in which the plurality of nucleic acids are disposed on a plurality of beads, rather than on a unitary planar substrate, as is described, inter alia, in Brenner et al., Proc. Natl. Acad. Sci. USA 97(4):1665-1670 (2000). Examples of nucleic acid microarrays may be found in U.S. Pat. Nos. 6,391,623, 6,383,754, 6,383,749, 6,380,377, 6,379,897, 6,376,191, 6,372,431, 6,351,712 6,344,316, 6,316,193, 6,312,906, 6,309,828, 6,309,824, 6,306,643, 6,300,063, 6,287,850, 6,284,497, 6,284,465, 6,280,954, 6,262,216, 6,251,601, 6,245,518, 6,263,287, 6,251,601, 6,238,866, 6,228,575, 6,214,587, 6,203,989, 6,171,797, 6,103,474, 6,083,726, 6,054,274, 6,040,138, 6,083,726, 6,004,755, 6,001,309, 5,958,342, 5,952,180, 5,936,731, 5,843,655, 5,814,454, 5,837,196, 5,436,327, 5,412,087, 5,405,783, the disclosures of which are incorporated herein by reference in their entireties.

[0058] In an alternative embodiment, a “microarray” may also refer to a “peptide microarray” or “protein microarray” having a substrate-bound collection of plurality of polypeptides, the binding to each of the plurality of bound polypeptides being separately detectable. Alternatively, the peptide microarray, may have a plurality of binders, including but not limited to monoclonal antibodies, polyclonal antibodies, phage display binders, yeast 2 hybrid binders, aptamers, which can specifically detect the binding of the polypeptides of this invention. The array may be based on autoantibody detection to the polypeptides of this invention, see Robinson et al., Nature Medicine 8(3):295-301 (2002). Examples of peptide arrays may be found in WO 02/31463, WO 02/25288, WO 01/94946, WO 01/88162, WO 01/68671, WO 01/57259, WO 00/61806, WO 00/54046, WO 00/47774, WO 99/40434, WO 99/39210, WO 97/42507 and U.S. Pat. Nos. 6,268,210, 5,766,960, 5,143,854, the disclosures of which are incorporated herein by reference in their entireties.

[0059] In addition, determination of the levels of the ESNA or ESP may be made in a multiplex manner using techniques described in WO 02/29109, WO 02/24959, WO 01/83502, WO01/73113, WO 01/59432, WO 01/57269, WO 99/67641, the disclosures of which are incorporated herein by reference in their entireties.

[0060] The term “mutant”, “mutated”, or “mutation” when applied to nucleic acid sequences means that nucleotides in a nucleic acid sequence may be inserted, deleted or changed compared to a reference nucleic acid sequence. A single alteration may be made at a locus (a point mutation) or multiple nucleotides may be inserted, deleted or changed at a single locus. In addition, one or more alterations may be made at any number of loci within a nucleic acid sequence. In a preferred embodiment of the present invention, the nucleic acid sequence is the wild type nucleic acid sequence encoding a ESP or is a ESNA. The nucleic acid sequence may be mutated by any method known in the art including those mutagenesis techniques described infra.

[0061] The term “error-prone PCR” refers to a process for performing PCR under conditions where the copying fidelity of the DNA polymerase is low, such that a high rate of point mutations is obtained along the entire length of the PCR product. See, e.g., Leung et al., Technique 1: 11-15 (1989) and Caldwell et al., PCR Methods Applic. 2: 28-33 (1992).

[0062] The term “oligonucleotide-directed mutagenesis” refers to a process which enables the generation of site-specific mutations in any cloned DNA segment of interest. See, e.g., Reidhaar-Olson et al., Science 241: 53-57 (1988).

[0063] The term “assembly PCR” refers to a process which involves the assembly of a PCR product from a mixture of small DNA fragments. A large number of different PCR reactions occur in parallel in the same vial, with the products of one reaction priming the products of another reaction.

[0064] The term “sexual PCR mutagenesis” or “DNA shuffling” refers to a method of error-prone PCR coupled with forced homologous recombination between DNA molecules of different but highly related DNA sequence in vitro, caused by random fragmentation of the DNA molecule based on sequence similarity, followed by fixation of the crossover by primer extension in an error-prone PCR reaction. See, e.g., Stemmer, Proc. Natl. Acad. Sci. U.S.A. 91: 10747-10751 (1994). DNA shuffling can be carried out between several related genes (“Family shuffling”).

[0065] The term “in vivo mutagenesis” refers to a process of generating random mutations in any cloned DNA of interest which involves the propagation of the DNA in a strain of bacteria such as E. coli that carries mutations in one or more of the DNA repair pathways. These “mutator” strains have a higher random mutation rate than that of a wild-type parent. Propagating the DNA in a mutator strain will eventually generate random mutations within the DNA.

[0066] The term “cassette mutagenesis” refers to any process for replacing a small region of a double-stranded DNA molecule with a synthetic oligonucleotide “cassette” that differs from the native sequence. The oligonucleotide often contains completely and/or partially randomized native sequence.

[0067] The term “recursive ensemble mutagenesis” refers to an algorithm for protein engineering (protein mutagenesis) developed to produce diverse populations of phenotypically related mutants whose members differ in amino acid sequence. This method uses a feedback mechanism to control successive rounds of combinatorial cassette mutagenesis. See, e.g., Arkin et al., Proc. Natl. Acad. Sci. U.S.A. 89: 7811-7815 (1992).

[0068] The term “exponential ensemble mutagenesis” refers to a process for generating combinatorial libraries with a high percentage of unique and functional mutants, wherein small groups of residues are randomized in parallel to identify, at each altered position, amino acids which lead to functional proteins. See, e.g., Delegrave et al., Biotechnology Research 11: 1548-1552 (1993); Arnold, Current Opinion in Biotechnology 4: 450-455 (1993).

[0069] “Operatively linked” expression control sequences refers to a linkage in which the expression control sequence is either contiguous with the gene of interest to control the gene of interest, or acts in trans or at a distance to control the gene of interest.

[0070] The term “expression control sequence” as used herein refers to polynucleotide sequences which are necessary to affect the expression of coding sequences to which they are operatively linked. Expression control sequences are sequences which control the transcription, post-transcriptional events and translation of nucleic acid sequences. Expression control sequences include appropriate transcription initiation, termination, promoter and enhancer sequences; efficient RNA processing signals such as splicing and polyadenylation signals; sequences that stabilize cytoplasmic mRNA; sequences that enhance translation efficiency (e.g., ribosome binding sites); sequences that enhance protein stability; and when desired, sequences that enhance protein secretion. The nature of such control sequences differs depending upon the host organism; in prokaryotes, such control sequences generally include promoter, ribosomal binding site, and transcription termination sequence. The term “control sequences” is intended to include, at a minimum, all components whose presence is essential for expression, and can also include additional components whose presence is advantageous, for example, leader sequences and fusion partner sequences.

[0071] The term “vector,” as used herein, is intended to refer to a nucleic acid molecule capable of transporting another nucleic acid to which it has been linked. One type of vector is a “plasmid”, which refers to a circular double stranded DNA loop into which additional DNA segments may be ligated. Other vectors include cosmids, bacterial artificial chromosomes (BAC) and yeast artificial chromosomes (YAC). Another type of vector is a viral vector, wherein additional DNA segments may be ligated into the viral genome. Viral vectors that infect bacterial cells are referred to as bacteriophages. Certain vectors are capable of autonomous replication in a host cell into which they are introduced (e.g., bacterial vectors having a bacterial origin of replication). Other vectors can be integrated into the genome of a host cell upon introduction into the host cell, and thereby are replicated along with the host genome. Moreover, certain vectors are capable of directing the expression of genes to which they are operatively linked. Such vectors are referred to herein as “recombinant expression vectors” (or simply, “expression vectors”). In general, expression vectors of utility in recombinant DNA techniques are often in the form of plasmids. In the present specification, “plasmid” and “vector” may be used interchangeably as the plasmid is the most commonly used form of vector. However, the invention is intended to include other forms of expression vectors that serve equivalent functions.

[0072] The term “recombinant host cell” (or simply “host cell”), as used herein, is intended to refer to a cell into which a recombinant expression vector has been introduced. It should be understood that such terms are intended to refer not only to the particular subject cell but to the progeny of such a cell. Because certain modifications may occur in succeeding generations due to either mutation or environmental influences, such progeny may not, in fact, be identical to the parent cell, but are still included within the scope of the term “host cell” as used herein.

[0073] As used herein, the phrase “open reading frame” and the equivalent acronym “ORF” refers to that portion of a transcript-derived nucleic acid that can be translated in its entirety into a sequence of contiguous amino acids. As so defined, an ORF has length, measured in nucleotides, exactly divisible by 3. As so defined, an ORF need not encode the entirety of a natural protein.

[0074] As used herein, the phrase “ORF-encoded peptide” refers to the predicted or actual translation of an ORF.

[0075] As used herein, the phrase “degenerate variant” of a reference nucleic acid sequence is meant to be inclusive of all nucleic acid sequences that can be directly translated, using the standard genetic code, to provide an amino acid sequence identical to that translated from the reference nucleic acid sequence.

[0076] The term “polypeptide” encompasses both naturally occurring and non-naturally occurring proteins and polypeptides, as well as polypeptide fragments and polypeptide mutants, derivatives and analogs thereof. A polypeptide may be monomeric or polymeric. Further, a polypeptide may comprise a number of different modules within a single polypeptide each of which has one or more distinct activities. A preferred polypeptide in accordance with the invention comprises a ESP encoded by a nucleic acid molecule of the instant invention, or a fragment, mutant, analog and derivative thereof.

[0077] The term “isolated protein” or “isolated polypeptide” is a protein or polypeptide that by virtue of its origin or source of derivation (1) is not associated with naturally associated components that accompany it in its native state, (2) is free of other proteins from the same species (3) is expressed by a cell from a different species, or (4) does not occur in nature. Thus, a polypeptide that is chemically synthesized or synthesized in a cellular system different from the cell from which it naturally originates will be “isolated” from its naturally associated components. A polypeptide or protein may also be rendered substantially free of naturally associated components by isolation, using protein purification techniques well known in the art.

[0078] A protein or polypeptide is “substantially pure,” “substantially homogeneous” or “substantially purified” when at least about 60% to 75% of a sample exhibits a single species of polypeptide. The polypeptide or protein may be monomeric or multimeric. A substantially pure polypeptide or protein will typically comprise about 50%, 60%, 70%, 80% or 90% W/W of a protein sample, more usually about 95%, and preferably will be over 99% pure. Protein purity or homogeneity may be determined by a number of means well known in the art, such as polyacrylamide gel electrophoresis of a protein sample, followed by visualizing a single polypeptide band upon staining the gel with a stain well known in the art. For certain purposes, higher resolution may be provided by using HPLC or other means well known in the art for purification.

[0079] The term “fragment” when used herein with respect to polypeptides of the present invention refers to a polypeptide that has an amino-terminal and/or carboxy-terminal deletion compared to a full-length ESP. In a preferred embodiment, the fragment is a contiguous sequence in which the amino acid sequence of the fragment is identical to the corresponding positions in the naturally occurring polypeptide. Fragments typically are at least 5, 6, 7, 8, 9 or 10 amino acids long, preferably at least 12, 14, 16 or 18 amino acids long, more preferably at least 20 amino acids long, more preferably at least 25, 30, 35, 40 or 45, amino acids, even more preferably at least 50 or 60 amino acids long, and even more preferably at least 70 amino acids long.

[0080] A “derivative” when used herein with respect to polypeptides of the present invention refers to a polypeptide which is substantially similar in primary structural sequence to a ESP but which include, e.g., in vivo or in vitro chemical and biochemical modifications that are not found in the ESP. Such modifications include, for example, acetylation, acylation, ADP-ribosylation, amidation, covalent attachment of flavin, covalent attachment of a heme moiety, covalent attachment of a nucleotide or nucleotide derivative, covalent attachment of a lipid or lipid derivative, covalent attachment of phosphotidylinositol, cross-linking, cyclization, disulfide bond formation, demethylation, formation of covalent cross-links, formation of cystine, formation of pyroglutamate, formylation, gamma-carboxylation, glycosylation, GPI anchor formation, hydroxylation, iodination, methylation, myristoylation, oxidation, proteolytic processing, phosphorylation, prenylation, racemization, selenoylation, sulfation, transfer-RNA mediated addition of amino acids to proteins such as arginylation, and ubiquitination. Other modification include, e.g., labeling with radionuclides, and various enzymatic modifications, as will be readily appreciated by those skilled in the art. A variety of methods for labeling polypeptides and of substituents or labels useful for such purposes are well known in the art, and include radioactive isotopes such as ¹²⁵I, ³²P, ³⁵S, ¹⁴C and ³H, ligands which bind to labeled antiligands (e.g., antibodies), fluorophores, chemiluminescent agents, enzymes, and antiligands which can serve as specific binding pair members for a labeled ligand. The choice of label depends on the sensitivity required, ease of conjugation with the primer, stability requirements, and available instrumentation. Methods for labeling polypeptides are well known in the art. See Ausubel (1992), supra; Ausubel (1999), supra.

[0081] The term “fusion protein” refers to polypeptides of the present invention coupled to a heterologous amino acid sequences. Fusion proteins are useful because they can be constructed to contain two or more desired functional elements from two or more different proteins. A fusion protein comprises at least 10 contiguous amino acids from a polypeptide of interest, more preferably at least 20 or 30 amino acids, even more preferably at least 40, 50 or 60 amino acids, yet more preferably at least 75, 100 or 125 amino acids. Fusion proteins can be produced recombinantly by constructing a nucleic acid sequence that encodes the polypeptide or a fragment thereof in frame with a nucleic acid sequence encoding a different protein or peptide and then expressing the fusion protein. Alternatively, a fusion protein can be produced chemically by crosslinking the polypeptide or a fragment thereof to another protein.

[0082] The term “analog” refers to both polypeptide analogs and non-peptide analogs. The term “polypeptide analog” as used herein refers to a polypeptide that is comprised of a segment of at least 25 amino acids that has substantial identity to a portion of an amino acid sequence but which contains non-natural amino acids or non-natural inter-residue bonds. In a preferred embodiment, the analog has the same or similar biological activity as the native polypeptide. Typically, polypeptide analogs comprise a conservative amino acid substitution (or insertion or deletion) with respect to the naturally occurring sequence. Analogs typically are at least 20 amino acids long, preferably at least 50 amino acids long or longer, and can often be as long as a full-length naturally occurring polypeptide.

[0083] The term “non-peptide analog” refers to a compound with properties that are analogous to those of a reference polypeptide. A non-peptide compound may also be termed a “peptide mimetic” or a “peptidomimetic.” Such compounds are often developed with the aid of computerized molecular modeling. Peptide mimetics that are structurally similar to useful peptides may be used to produce an equivalent effect. Generally, peptidomimetics are structurally similar to a paradigm polypeptide (i.e., a polypeptide that has a desired biochemical property or pharmacological activity), but have one or more peptide linkages optionally replaced by a linkage selected from the group consisting of: —CH₂NH—, —CH₂S—, —CH₂—CH₂—, —CH═CH—(cis and trans), —COCH₂—, —CH(OH)CH₂—, and CH₂SO—, by methods well known in the art. Systematic substitution of one or more amino acids of a consensus sequence with a D-amino acid of the same type (e.g., D-lysine in place of L-lysine) may also be used to generate more stable peptides. In addition, constrained peptides comprising a consensus sequence or a substantially identical consensus sequence variation may be generated by methods known in the art (Rizo et al., Ann. Rev. Biochem. 61:387-418 (1992)). For example, one may add internal cysteine residues capable of forming intramolecular disulfide bridges which cyclize the peptide.

[0084] The term “mutant” or “mutein” when referring to a polypeptide of the present invention relates to an amino acid sequence containing substitutions, insertions or deletions of one or more amino acids compared to the amino acid sequence of a ESP. A mutein may have one or more amino acid point substitutions, in which a single amino acid at a position has been changed to another amino acid, one or more insertions and/or deletions, in which one or more amino acids are inserted or deleted, respectively, in the sequence of the naturally occurring protein, and/or truncations of the amino acid sequence at either or both the amino or carboxy termini. Further, a mutein may have the same or different biological activity as the naturally occurring protein. For instance, a mutein may have an increased or decreased biological activity. A mutein has at least 50% sequence similarity to the wild type protein, preferred is 60% sequence similarity, more preferred is 70% sequence similarity. Even more preferred are muteins having 80%, 85% or 90% sequence similarity to a ESP. In an even more preferred embodiment, a mutein exhibits 95% sequence identity, even more preferably 97%, even more preferably 98% and even more preferably 99%. Sequence similarity may be measured by any common sequence analysis algorithm, such as GAP or BESTFIT or other variation Smith-Waterman alignment. See, T. F. Smith and M. S. Waterman, J. Mol. Biol. 147:195-197 (1981) and W. R. Pearson, Genomics 11:635-650 (1991).

[0085] Preferred amino acid substitutions are those which: (1) reduce susceptibility to proteolysis, (2) reduce susceptibility to oxidation, (3) alter binding affinity for forming protein complexes, (4) alter binding affinity or enzymatic activity, and (5) confer or modify other physicochemical or functional properties of such analogs. For example, single or multiple amino acid substitutions (preferably conservative amino acid substitutions) may be made in the naturally occurring sequence (preferably in the portion of the polypeptide outside the domain(s) forming intermolecular contacts. In a preferred embodiment, the amino acid substitutions are moderately conservative substitutions or conservative substitutions. In a more preferred embodiment, the amino acid substitutions are conservative substitutions. A conservative amino acid substitution should not substantially change the structural characteristics of the parent sequence (e.g., a replacement amino acid should not tend to disrupt a helix that occurs in the parent sequence, or disrupt other types of secondary structure that characterizes the parent sequence). Examples of art-recognized polypeptide secondary and tertiary structures are described in Creighton (ed.), Proteins, Structures and Molecular Principles, W. H. Freeman and Company (1984); Branden et al. (ed.), Introduction to Protein Structure, Garland Publishing (1991); Thornton et al., Nature 354:105-106 (1991).

[0086] As used herein, the twenty conventional amino acids and their abbreviations follow conventional usage. See Golub et al. (eds.), Immunology—A Synthesis 2^{nd} Ed., Sinauer Associates (1991). Stereoisomers (e.g., D-amino acids) of the twenty conventional amino acids, unnatural amino acids such as α-, α-disubstituted amino acids, N-alkyl amino acids, and other unconventional amino acids may also be suitable components for polypeptides of the present invention. Examples of unconventional amino acids include: 4-hydroxyproline, γ-carboxyglutamate, ε-N,N,N-trimethyllysine, ε-N-acetyllysine, O-phosphoserine, N-acetylserine, N-formylmethionine, 3-methylhistidine, 5-hydroxylysine, s-N-methylarginine, and other similar amino acids and imino acids (e.g., 4-hydroxyproline). In the polypeptide notation used herein, the lefthand direction is the amino terminal direction and the right hand direction is the carboxy-terminal direction, in accordance with standard usage and convention.

[0087] By “homology” or “homologous” when referring to a polypeptide of the present invention it is meant polypeptides from different organisms with a similar sequence to the encoded amino acid sequence of a ESP and a similar biological activity or function. Although two polypeptides are said to be “homologous,” this does not imply that there is necessarily an evolutionary relationship between the polypeptides. Instead, the term “homologous” is defined to mean that the two polypeptides have similar amino acid sequences and similar biological activities or functions. In a preferred embodiment, a homologous polypeptide is one that exhibits 50% sequence similarity to ESP, preferred is 60% sequence similarity, more preferred is 70% sequence similarity. Even more preferred are homologous polypeptides that exhibit 80%, 85% or 90% sequence similarity to a ESP. In a yet more preferred embodiment, a homologous polypeptide exhibits 95%, 97%, 98% or 99% sequence similarity.

[0088] When “sequence similarity” is used in reference to polypeptides, it is recognized that residue positions that are not identical often differ by conservative amino acid substitutions. In a preferred embodiment, a polypeptide that has “sequence similarity” comprises conservative or moderately conservative amino acid substitutions. A “conservative amino acid substitution” is one in which an amino acid residue is substituted by another amino acid residue having a side chain (R group) with similar chemical properties (e.g., charge or hydrophobicity). In general, a conservative amino acid substitution will not substantially change the functional properties of a protein. In cases where two or more amino acid sequences differ from each other by conservative substitutions, the percent sequence identity or degree of similarity may be adjusted upwards to correct for the conservative nature of the substitution. Means for making this adjustment are well known to those of skill in the art. See, e.g., Pearson, Methods Mol. Biol. 24: 307-31(1994).

[0089] For instance, the following six groups each contain amino acids that are conservative substitutions for one another:
[0090] 1) Serine (S), Threonine (T);
[0091] 2) Aspartic Acid (D), Glutamic Acid (E);
[0092] 3) Asparagine (N), Glutamine (Q);
[0093] 4) Arginine (R), Lysine (K);
[0094] 5) Isoleucine (I), Leucine (L), Methionine (M), Alanine (A), Valine (V), and
[0095] 6) Phenylalanine (F), Tyrosine (Y), Tryptophan (W).

[0096] Alternatively, a conservative replacement is any change having a positive value in the PAM250 log-likelihood matrix disclosed in Gonnet et al., Science 256: 1443-45 (1992). A “moderately conservative” replacement is any change having a nonnegative value in the PAM250 log-likelihood matrix.

[0097] Sequence similarity for polypeptides, which is also referred to as sequence identity, is typically measured using sequence analysis software. Protein analysis software matches similar sequences using measures of similarity assigned to various substitutions, deletions and other modifications, including conservative amino acid substitutions. For instance, GCG contains programs such as “Gap” and “Bestfit” which can be used with default parameters to determine sequence homology or sequence identity between closely related polypeptides, such as homologous polypeptides from different species of organisms or between a wild type protein and a mutein thereof. See, e.g., GCG Version 6.1. Other programs include FASTA, discussed supra.

[0098] A preferred algorithm when comparing a sequence of the invention to a database containing a large number of sequences from different organisms is the computer program BLAST, especially blastp or tblastn. See, e.g., Altschul et al., J. Mol. Biol. 215: 403-410 (1990); Altschul et al., Nucleic Acids Res. 25:3389-402 (1997). Preferred parameters for blastp are:

| | | |
|---|---|---|
| Expectation value: | 10 | (default) |
| Filter: | seg | (default) |
| Cost to open a gap: | 11 | (default) |
| Cost to extend a gap: | 1 | (default |
| Max. alignments: | 100 | (default) |
| Word size: | 11 | (default) |
| No. of descriptions: | 100 | (default) |

| | |
|---|---|
| Penalty Matrix: | BLOSUM62 |

[0099] The length of polypeptide sequences compared for homology will generally be at least about 16 amino acid residues, usually at least about 20 residues, more usually at least about 24 residues, typically at least about 28 residues, and preferably more than about 35 residues. When searching a database containing sequences from a large number of different organisms, it is preferable to compare amino acid sequences.

[0100] Algorithms other than blastp for database searching using amino acid sequences are known in the art. For instance, polypeptide sequences can be compared using FASTA, a program in GCG Version 6.1. FASTA (e.g., FASTA2 and FASTA3) provides alignments and percent sequence identity of the regions of the best overlap between the query and search sequences (Pearson (1990), supra; Pearson (2000), supra. For example, percent sequence identity between amino acid sequences can be determined using FASTA with its default or recommended parameters (a word size of 2 and the PAM250 scoring matrix), as provided in GCG Version 6.1.

[0101] An “antibody” refers to an intact immunoglobulin, or to an antigen-binding portion thereof that competes with the intact antibody for specific binding to a molecular species, e.g., a polypeptide of the instant invention. Antigen-binding portions may be produced by recombinant DNA techniques or by enzymatic or chemical cleavage of intact antibodies. Antigen-binding portions include, inter alia, Fab, Fab′, F(ab′)₂, Fv, dAb, and complementarity determining region (CDR) fragments, single-chain antibodies (scFv), chimeric antibodies, diabodies and polypeptides that contain at least a portion of an immunoglobulin that is sufficient to confer specific antigen binding to the polypeptide. A Fab fragment is a monovalent fragment consisting of the VL, VH, CL and CH1 domains; a F(ab′)₂ fragment is a bivalent fragment comprising two Fab fragments linked by a disulfide bridge at the hinge region; a Fd fragment consists of the VH and CH1 domains; a Fv fragment consists of the VL and VH domains of a single arm of an antibody; and a dAb fragment consists of a VH domain. See, e.g., Ward et al., Nature 341: 544-546 (1989).

[0102] By “bind specifically” and “specific binding” as used herein it is meant the ability of the antibody to bind to a first molecular species in preference to binding to other molecular species with which the antibody and first molecular species are admixed. An antibody is said specifically to “recognize” a first molecular species when it can bind specifically to that first molecular species.

[0103] A single-chain antibody (scFv) is an antibody in which VL and VH regions are paired to form a monovalent molecule via a synthetic linker that enables them to be made as a single protein chain. See, e.g., Bird et al., Science 242: 423-426 (1988); Huston et al., Proc. Natl. Acad. Sci. USA 85: 5879-5883 (1988). Diabodies are bivalent, bispecific antibodies in which VH and VL domains are expressed on a single polypeptide chain, but using a linker that is too short to allow for pairing between the two domains on the same chain, thereby forcing the domains to pair with complementary domains of another chain and creating two antigen binding sites. See e.g., Holliger et al., Proc. Natl. Acad. Sci. USA 90: 6444-6448 (1993); Poljak et al., Structure 2: 1121-1123 (1994). One or more CDRs may be incorporated into a molecule either covalently or noncovalently to make it an immunoadhesin. An immunoadhesin may incorporate the CDR(s) as part of a larger polypeptide chain, may covalently link the CDR(s) to another polypeptide chain, or may incorporate the CDR(s) noncovalently. The CDRs permit the immunoadhesin to specifically bind to a particular antigen of interest. A chimeric antibody is an antibody that contains one or more regions from one antibody and one or more regions from one or more other antibodies.

[0104] An antibody may have one or more binding sites. If there is more than one binding site, the binding sites may be identical to one another or may be different. For instance, a naturally occurring immunoglobulin has two identical binding sites, a single-chain antibody or Fab fragment has one binding site, while a “bispecific” or “bifunctional” antibody has two different binding sites.

[0105] An “isolated antibody” is an antibody that (1) is not associated with naturally-associated components, including other naturally-associated antibodies, that accompany it in its native state, (2) is free of other proteins from the same species, (3) is expressed by a cell from a different species, or (4) does not occur in nature. It is known that purified proteins, including purified antibodies, may be stabilized with non-naturally-associated components. The non-naturally-associated component may be a protein, such as albumin (e.g., BSA) or a chemical such as polyethylene glycol (PEG).

[0106] A “neutralizing antibody” or “an inhibitory antibody” is an antibody that inhibits the activity of a polypeptide or blocks the binding of a polypeptide to a ligand that normally binds to it. An “activating antibody” is an antibody that increases the activity of a polypeptide.

[0107] The term “epitope” includes any protein determinant capable of specific binding to an immunoglobulin or T-cell receptor. Epitopic determinants usually consist of chemically active surface groupings of molecules such as amino acids or sugar side chains and usually have specific three-dimensional structural characteristics, as well as specific charge characteristics. An antibody is said to specifically bind an antigen when the dissociation constant is less than 1 μM, preferably less than 100 nM and most preferably less than 10 nM.

[0108] The term “patient” includes human and veterinary subjects.

[0109] Throughout this specification and claims, the word “comprise,” or variations such as “comprises” or “comprising,” will be understood to imply the inclusion of a stated integer or group of integers but not the exclusion of any other integer or group of integers.

[0110] The term “endometrial specific” refers to a nucleic acid molecule or polypeptide that is expressed predominantly in the endometrial as compared to other tissues in the body. In a preferred embodiment, a “endometrial specific” nucleic acid molecule or polypeptide is detected at a level that is 1.5-fold higher than any other tissue in the body. In a more preferred embodiment, the “endometrial specific” nucleic acid molecule or polypeptide is detected at a level that is 2-fold higher than any other tissue in the body, more preferably 5-fold higher, still more preferably at least 10-fold, 15-fold, 20-fold, 25-fold, 50-fold or 100-fold higher than any other tissue in the body. Nucleic acid molecule levels may be measured by nucleic acid hybridization, such as Northern blot hybridization, or quantitative PCR. Polypeptide levels may be measured by any method known to accurately quantitate protein levels, such as Western blot analysis.

Nucleic Acid Molecules. Regulatory Sequences. Vectors, Host Cells and Recombinant Methods of Making Polypeptides

[0111] Nucleic Acid Molecules

[0112] One aspect of the invention provides isolated nucleic acid molecules that are specific to the endometrial or to endometrial cells or tissue or that are derived from such nucleic acid molecules. These isolated endometrial specific nucleic acids (ESNAs) may comprise cDNA genomic DNA, RNA, or a combination thereof, a fragment of one of these nucleic acids, or may be a non-naturally occurring nucleic acid molecule. A ESNA may be derived from an animal. In a preferred embodiment, the ESNA is derived from a human or other mammal. In a more preferred embodiment, the ESNA is derived from a human or other primate. In an even more preferred embodiment, the ESNA is derived from a human.

[0113] In a preferred embodiment, the nucleic acid molecule encodes a polypeptide that is specific to endometrial, a endometrial-specific polypeptide (ESP). In a more preferred embodiment, the nucleic acid molecule encodes a polypeptide that comprises an amino acid sequence of SEQ ID NO: 473-666. In another highly preferred embodiment, the nucleic acid molecule comprises a nucleic acid sequence of SEQ ID NO: 1-472. Nucleotide sequences of the instantly-described nucleic acid molecules were determined by assembling several DNA molecules from either public or proprietary databases. Some of the underlying DNA sequences are the result, directly or indirectly, of at least one enzymatic polymerization reaction (e.g., reverse transcription and/or polymerase chain reaction) using an automated sequencer (such as the MegaBACE™ 1000, Amersham Biosciences, Sunnyvale, Calif., USA).

[0114] Nucleic acid molecules of the present invention may also comprise sequences that selectively hybridizes to a nucleic acid molecule encoding a ESNA or a complement or antisense thereof. The hybridizing nucleic acid molecule may or may not encode a polypeptide or may or may not encode a ESP. However, in a preferred embodiment, the hybridizing nucleic acid molecule encodes a ESP. In a more preferred embodiment, the invention provides a nucleic acid molecule that selectively hybridizes to a nucleic acid molecule or the antisense sequence of a nucleic acid molecule that encodes a polypeptide comprising an amino acid sequence of SEQ ID NO: 473-666. In an even more preferred embodiment, the invention provides a nucleic acid molecule that selectively hybridizes to a nucleic acid molecule comprising the nucleic acid sequence of SEQ ID NO: 1-472 or the antisense sequence thereof. Preferably, the nucleic acid molecule selectively hybridizes to a nucleic acid molecule or the antisense sequence of a nucleic acid molecule encoding a ESP under low stringency conditions. More preferably, the nucleic acid molecule selectively hybridizes to a nucleic acid molecule or the antisense sequence of a nucleic acid molecule encoding a ESP under moderate stringency conditions. Most preferably, the nucleic acid molecule selectively hybridizes to a nucleic acid molecule or the antisense sequence of a nucleic acid molecule encoding a ESP under high stringency conditions. In a preferred embodiment, the nucleic acid molecule hybridizes under low, moderate or high stringency conditions to a nucleic acid molecule or the antisense sequence of a nucleic acid molecule encoding a polypeptide comprising an amino acid sequence of SEQ ID NO: 473-666. In a more preferred embodiment, the nucleic acid molecule hybridizes under low, moderate or high stringency conditions to a nucleic acid molecule or the antisense sequence of a nucleic acid molecule comprising a nucleic acid sequence selected from SEQ ID NO: 1-472.

[0115] Nucleic acid molecules of the present invention may also comprise nucleic acid sequences that exhibit substantial sequence similarity to a nucleic acid encoding a ESP or a complement of the encoding nucleic acid molecule. In this embodiment, it is preferred that the nucleic acid molecule exhibit substantial sequence similarity to a nucleic acid molecule encoding human ESP. More preferred is a nucleic acid molecule exhibiting substantial sequence similarity to a nucleic acid molecule encoding a polypeptide having an amino acid sequence of SEQ ID NO: 473-666. By substantial sequence similarity it is meant a nucleic acid molecule having at least 60% sequence identity with a nucleic acid molecule encoding a ESP, such as a polypeptide having an amino acid sequence of SEQ ID NO: 473-666, more preferably at least 70%, even more preferably at least 80% and even more preferably at least 85%. In a more preferred embodiment, the similar nucleic acid molecule is one that has at least 90% sequence identity with a nucleic acid molecule encoding a ESP, more preferably at least 95%, more preferably at least 97%, even more preferably at least 98%, and still more preferably at least 99%. Most preferred in this embodiment is a nucleic acid molecule that has at least 99.5%, 99.6%, 99.7%, 99.8% or 99.9% sequence identity with a nucleic acid molecule encoding a ESP.

[0116] The nucleic acid molecules of the present invention are also inclusive of those exhibiting substantial sequence similarity to a ESNA or its complement. In this embodiment, it is preferred that the nucleic acid molecule exhibit substantial sequence similarity to a nucleic acid molecule having a nucleic acid sequence of SEQ ID NO: 1-472. By substantial sequence similarity it is meant a nucleic acid molecule that has at least 60% sequence identity with a ESNA, such as one having a nucleic acid sequence of SEQ ID NO: 1-472, more preferably at least 70%, even more preferably at least 80% and even more preferably at least 85%. More preferred is a nucleic acid molecule that has at least 90% sequence identity with a ESNA, more preferably at least 95%, more preferably at least 97%, even more preferably at least 98%, and still more preferably at least 99%. Most preferred is a nucleic acid molecule that has at least 99.5%, 99.6%, 99.7%, 99.8% or 99.9% sequence identity with a ESNA.

[0117] Nucleic acid molecules that exhibit substantial sequence similarity are inclusive of sequences that exhibit sequence identity over their entire length to a ESNA or to a nucleic acid molecule encoding a ESP, as well as sequences that are similar over only a part of its length. In this case, the part is at least 50 nucleotides of the ESNA or the nucleic acid molecule encoding a ESP, preferably at least 100 nucleotides, more preferably at least 150 or 200 nucleotides, even more preferably at least 250 or 300 nucleotides, still more preferably at least 400 or 500 nucleotides.

[0118] The substantially similar nucleic acid molecule may be a naturally occurring one that is derived from another species, especially one derived from another primate, wherein the similar nucleic acid molecule encodes an amino acid sequence that exhibits significant sequence identity to that of SEQ ID NO: 473-666 or demonstrates significant sequence identity to the nucleotide sequence of SEQ ID NO: 1-472. The similar nucleic acid molecule may also be a naturally occurring nucleic acid molecule from a human, when the ESNA is a member of a gene family. The similar nucleic acid molecule may also be a naturally occurring nucleic acid molecule derived from a non-primate, mammalian species, including without limitation, domesticated species, e.g., dog, cat, mouse, rat, rabbit, hamster, cow, horse and pig; and wild animals, e.g., monkey, fox, lions, tigers, bears, giraffes, zebras, etc. The substantially similar nucleic acid molecule may also be a naturally occurring nucleic acid molecule derived from a non-mammalian species, such as birds or reptiles. The naturally occurring substantially similar nucleic acid molecule may be isolated directly from humans or other species. In another embodiment, the substantially similar nucleic acid molecule may be one that is experimentally produced by random mutation of a nucleic acid molecule. In another embodiment, the substantially similar nucleic acid molecule may be one that is experimentally produced by directed mutation of a ESNA. In a preferred embodiment, the substantially similar nucleic acid molecule is an ESNA.

[0119] The nucleic acid molecules of the present invention are also inclusive of allelic variants of a ESNA or a nucleic acid encoding a ESP. For example, single nucleotide polymorphisms (SNPs) occur frequently in eukaryotic genomes and the sequence determined from one individual of a species may differ from other allelic forms present within the population. More than 1.4 million SNPs have already identified in the human genome, International Human Genome Sequencing Consortium, Nature 409: 860-921 (2001)—Variants with small deletions and insertions of more than a single nucleotide are also found in the general population, and often do not alter the function of the protein. In addition, amino acid substitutions occur frequently among natural allelic variants, and often do not substantially change protein function.

[0120] In a preferred embodiment, the allelic variant is a variant of a gene, wherein the gene is transcribed into an mRNA that encodes a ESP. In a more preferred embodiment, the gene is transcribed into an mRNA that encodes a ESP comprising an amino acid sequence of SEQ ID NO: 473-666. In another preferred embodiment, the allelic variant is a variant of a gene, wherein the gene is transcribed into an mRNA that is a ESNA. In a more preferred embodiment, the gene is transcribed into an mRNA that comprises the nucleic acid sequence of SEQ ID NO: 1-472. Also preferred is that the allelic variant is a naturally occurring allelic variant in the species of interest, particularly human.

[0121] Nucleic acid molecules of the present invention are also inclusive of nucleic acid sequences comprising a part of a nucleic acid sequence of the instant invention. The part may or may not encode a polypeptide, and may or may not encode a polypeptide that is a ESP. In a preferred embodiment, the part encodes a ESP. In one embodiment, the nucleic acid molecule comprises a part of a ESNA. In another embodiment, the nucleic acid molecule comprises a part of a nucleic acid molecule that hybridizes or exhibits substantial sequence similarity to a ESNA. In another embodiment, the nucleic acid molecule comprises a part of a nucleic acid molecule that is an allelic variant of a ESNA. In yet another embodiment, the nucleic acid molecule comprises a part of a nucleic acid molecule that encodes a ESP. A part comprises at least 10 nucleotides, more preferably at least 15, 17, 18, 20, 25, 30, 35, 40, 50, 60, 70, 80, 90, 100, 150, 200, 250, 300, 350, 400 or 500 nucleotides. The maximum size of a nucleic acid part is one nucleotide shorter than the sequence of the nucleic acid molecule encoding the full-length protein.

[0122] Nucleic acid molecules of the present invention are also inclusive of nucleic acid sequences that encode fusion proteins, homologous proteins, polypeptide fragments, muteins and polypeptide analogs, as described infra.

[0123] Nucleic acid molecules of the present invention are also inclusive of nucleic acid sequences containing modifications of the native nucleic acid molecule. Examples of such modifications include, but are not limited to, normative internucleoside bonds, post-synthetic modifications or altered nucleotide analogues. One having ordinary skill in the art would recognize that the type of modification that may be made will depend upon the intended use of the nucleic acid molecule. For instance, when the nucleic acid molecule is used as a hybridization probe, the range of such modifications will be limited to those that permit sequence-discriminating base pairing of the resulting nucleic acid. When used to direct expression of RNA or protein in vitro or in vivo, the range of such modifications will be limited to those that permit the nucleic acid to function properly as a polymerization substrate. When the isolated nucleic acid is used as a therapeutic agent, the modifications will be limited to those that do not confer toxicity upon the isolated nucleic acid.

[0124] Accordingly, in one embodiment, a nucleic acid molecule may include nucleotide analogues that incorporate labels that are directly detectable, such as radiolabels or fluorophores, or nucleotide analogues that incorporate labels that can be visualized in a subsequent reaction, such as biotin or various haptens. The labeled nucleic acid molecules are particularly useful as hybridization probes.

[0125] Common radiolabeled analogues include those labeled with ³³P, ³²P, and ³⁵S, such as α-³²P-dATP, α-³²P-dCTP, α-³²P-dGTP, α-³²P-dTTP, α-³²P-3′dATP, α-³²P-ATP, α-³²P-CTP, α-³²P-GTP, α-³²P-UTP, α-³⁵S-dATP, γ-³⁵S-GTP, γ-³³P-dATP, and the like.

[0126] Commercially available fluorescent nucleotide analogues readily incorporated into the nucleic acids of the present invention include Cy3-dCTP, Cy3-dUTP, Cy5-dCTP, Cy3-dUTP (Amersham Biosciences, Piscataway, N.J., USA), fluorescein-12-dUTP, tetramethylrhodamine-6-dUTP, Texas Red®-5-dUTP, Cascade Blue®-7-dUTP, BODIPY® FL-14-dUTP, BODIPY® TMR-14-dUTP, BODIPY® TR-14-dUTP, Rhodamine Green™-5-dUTP, Oregon Green® 488-5-dUTP, Texas Red®-12-dUTP, BODIPY® 630/650-14-dUTP, BODIPY® 650/665-14-dUTP, Alexa Fluor® 488-5-dUTP, Alexa Fluor® 532-5-dUTP, Alexa Fluor® 568-5-dUTP, Alexa Fluor® 594-5-dUTP, Alexa Fluor® 546-14-dUTP, fluorescein-12-UTP, tetramethylrhodamine-6-UTP, Texas Red®-5-UTP, Cascade Blue®-7-UTP, BODIPY® FL-14-UTP, BODIPY® TMR-14-UTP, BODIPY® TR-14-UTP, Rhodamine Green™-5-UTP, Alexa Fluor® 488-5-UTP, Alexa Fluor® 546-14-UTP (Molecular Probes, Inc. Eugene, Oreg., USA). One may also custom synthesize nucleotides having other fluorophores. See Henegariu et al., Nature Biotechnol. 18: 345-348 (2000).

[0127] Haptens that are commonly conjugated to nucleotides for subsequent labeling include biotin (biotin-11-dUTP, Molecular Probes, Inc., Eugene, Oreg., USA; biotin-21-UTP, biotin-21-dUTP, Clontech Laboratories, Inc., Palo Alto, Calif., USA), digoxigenin (DIG-11-dUTP, alkali labile, DIG-1-UTP, Roche Diagnostics Corp., Indianapolis, Ind., USA), and dinitrophenyl(dinitrophenyl-11-dUTP, Molecular Probes, Inc., Eugene, Oreg., USA).

[0128] Nucleic acid molecules of the present invention can be labeled by incorporation of labeled nucleotide analogues into the nucleic acid. Such analogues can be incorporated by enzymatic polymerization, such as by nick translation, random priming, polymerase chain reaction (PCR), terminal transferase tailing, and end-filling of overhangs, for DNA molecules, and in vitro transcription driven, e.g., from phage promoters, such as T7, T3, and SP6, for RNA molecules. Commercial kits are readily available for each such labeling approach. Analogues can also be incorporated during automated solid phase chemical synthesis. Labels can also be incorporated after nucleic acid synthesis, with the 5′ phosphate and 3′ hydroxyl providing convenient sites for post-synthetic covalent attachment of detectable labels.

[0129] Other post-synthetic approaches also permit internal labeling of nucleic acids. For example, fluorophores can be attached using a cisplatin reagent that reacts with the N7 of guanine residues (and, to a lesser extent, adenine bases) in DNA, RNA, and Peptide Nucleic Acids (PNA) to provide a stable coordination complex between the nucleic acid and fluorophore label (Universal Linkage System) (available from Molecular Probes, Inc., Eugene, Oreg., USA and Amersham Pharmacia Biotech, Piscataway, N.J., USA); see Alers et al., Genes, Chromosomes & Cancer 25: 301-305 (1999); Jelsma et al., J. NIH Res. 5: 82 (1994); Van Belkum et al., BioTechniques 16: 148-153 (1994). Alternatively, nucleic acids can be labeled using a disulfide-containing linker (FastTag™ Reagent, Vector Laboratories, Inc., Burlingame, Calif., USA) that is photo- or thermally coupled to the target nucleic acid using aryl azide chemistry; after reduction, a free thiol is available for coupling to a hapten, fluorophore, sugar, affinity ligand, or other marker.

[0130] One or more independent or interacting labels can be incorporated into the nucleic acid molecules of the present invention. For example, both a fluorophore and a moiety that in proximity thereto acts to quench fluorescence can be included to report specific hybridization through release of fluorescence quenching or to report exonucleotidic excision. See, e.g., Tyagi et al., Nature Biotechnol. 14: 303-308 (1996); Tyagi et al., Nature Biotechnol. 16: 49-53 (1998); Sokol et al., Proc. Natl. Acad. Sci. USA 95: 11538-11543 (1998); Kostrikis et al., Science 279: 1228-1229 (1998); Marras et al., Genet. Anal. 14: 151-156 (1999); Holland et al., Proc. Natl. Acad. Sci. USA 88: 7276-7280 (1991); Heid et al., Genome Res. 6(10): 986-94 (1996); Kuimelis et al., Nucleic Acids Symp. Ser. (37): 255-6 (1997); and U.S. Pat. Nos. 5,846,726, 5,925,517, 5,925,517, 5,723,591 and 5,538,848, the disclosures of which are incorporated herein by reference in their entireties.

[0131] Nucleic acid molecules of the present invention may also be modified by altering one or more native phosphodiester internucleoside bonds to more nuclease-resistant, internucleoside bonds. See Hartmann et al. (eds.), Manual of Antisense Methodology: Perspectives in Antisense Science, Kluwer Law International (1999); Stein et al. (eds.), Applied Antisense Oligonucleotide Technology, Wiley-Liss (1998); Chadwick et al. (eds.), Oligonucleotides as Therapeutic Agents—Symposium No. 209, John Wiley & Son Ltd (1997). Such altered internucleoside bonds are often desired for techniques or for targeted gene correction, Gamper et al., Nucl. Acids Res. 28(21): 43324339 (2000). For double stranded RNA inhibition which may utilize either natural ds RNA or ds RNA modified in its, sugar, phosphate or base, see Hannon, Nature 418(11): 244-251 (2002); Fire et al. in WO 99/32619; Tuschl et al. in US2002/0086356; Kruetzer et al. in WO 00/44895, the disclosures of which are incorporated herein by reference in their entirety. For circular antisense, see Kool in U.S. Pat. No. 5,426,180, the disclosure of which is incorporated herein by reference in its entirety.

[0132] Modified oligonucleotide backbones include, without limitation, phosphorothioates, chiral phosphorothioates, phosphorodithioates, phosphotriesters, aminoalkylphosphotriesters, methyl and other alkyl phosphonates including 3′-alkylene phosphonates and chiral phosphonates, phosphinates, phosphoramidates including 3′-amino phosphoramidate and aminoalkylphosphoramidates, thionophosphoramidates, thionoalkylphosphonates, thionoalkylphosphotriesters, and boranophosphates having normal 3′-5′ linkages, 2′-5′ linked analogs of these, and those having inverted polarity wherein the adjacent pairs of nucleoside units are linked 3′-5′ to 5′-3′ or 2′-5′ to 5′-2′. Representative U.S. Patents that teach the preparation of the above phosphorus-containing linkages include, but are not limited to, U.S. Pat. Nos. 3,687,808; 4,469,863; 4,476,301; 5,023,243; 5,177,196; 5,188,897; 5,264,423; 5,276,019; 5,278,302; 5,286,717; 5,321,131; 5,399,676; 5,405,939; 5,453,496; 5,455,233; 5,466,677; 5,476,925; 5,519,126; 5,536,821; 5,541,306; 5,550,111; 5,563,253; 5,571,799; 5,587,361; and 5,625,050, the disclosures of which are incorporated herein by reference in their entireties. In a preferred embodiment, the modified internucleoside linkages may be used for antisense techniques.

[0133] Other modified oligonucleotide backbones do not include a phosphorus atom, but have backbones that are formed by short chain alkyl or cycloalkyl internucleoside linkages, mixed heteroatom and alkyl or cycloalkyl internucleoside linkages, or one or more short chain heteroatomic or heterocyclic internucleoside linkages. These include those having morpholino linkages (formed in part from the sugar portion of a nucleoside); siloxane backbones; sulfide, sulfoxide and sulfone backbones; formacetyl and thioformacetyl backbones; methylene formacetyl and thioformacetyl backbones; alkene containing backbones; sulfamate backbones; methyleneimino and methylenehydrazino backbones; sulfonate and sulfonamide backbones; amide backbones; and others having mixed N, O, S and CH₂ component parts. Representative U.S. patents that teach the preparation of the above backbones include, but are not limited to, U.S. Pat. Nos. 5,034,506; 5,166,315; 5,185,444; 5,214,134; 5,216,141; 5,235,033; 5,264,562; 5,264,564; 5,405,938; 5,434,257; 5,466,677; 5,470,967; 5,489,677; 5,541,307; 5,561,225; 5,596,086; 5,602,240; 5,610,289; 5,602,240; 5,608,046; 5,610,289; 5,618,704; 5,623,070; 5,663,312; 5,633,360; 5,677,437 and 5,677,439; the disclosures of which are incorporated herein by reference in their entireties.

[0134] In other preferred nucleic acid molecules, both the sugar and the internucleoside linkage are replaced with novel groups, such as peptide nucleic acids (PNA). In PNA compounds, the phosphodiester backbone of the nucleic acid is replaced with an amide-containing backbone, in particular by repeating N-(2-aminoethyl)glycine units linked by amide bonds. Nucleobases are bound directly or indirectly to aza nitrogen atoms of the amide portion of the backbone, typically by methylene carbonyl linkages. PNA can be synthesized using a modified peptide synthesis protocol. PNA oligomers can be synthesized by both Fmoc and tBoc methods. Representative U.S. patents that teach the preparation of PNA compounds include, but are not limited to, U.S. Pat. Nos. 5,539,082; 5,714,331; and 5,719,262, each of which is herein incorporated by reference in its entirety. Automated PNA synthesis is readily achievable on commercial synthesizers (see, e.g., “PNA User's Guide,” Rev. 2, February 1998, Perseptive Biosystems Part No. 60138, Applied Biosystems, Inc., Foster City, Calif.). PNA molecules are advantageous for a number of reasons. First, because the PNA backbone is uncharged, PNA/DNA and PNA/RNA duplexes have a higher thermal stability than is found in DNA/DNA and DNA/RNA duplexes. The Tm of a PNA/DNA or PNA/RNA duplex is generally 1° C. higher per base pair than the Tm of the corresponding DNA/DNA or DNA/RNA duplex (in 100 mM NaCl). Second, PNA molecules can also form stable PNA/DNA complexes at low ionic strength, under conditions in which DNA/DNA duplex formation does not occur. Third, PNA also demonstrates greater specificity in binding to complementary DNA because a PNA/DNA mismatch is more destabilizing than DNA/DNA mismatch. A single mismatch in mixed a PNA/DNA 15-mer lowers the Tm by 8-20° C. (15° C. on average). In the corresponding DNA/DNA duplexes, a single mismatch lowers the Tm by 4-16° C. (11° C. on average). Because PNA probes can be significantly shorter than DNA probes, their specificity is greater. Fourth, PNA oligomers are resistant to degradation by enzymes, and the lifetime of these compounds is extended both in vivo and in vitro because nucleases and proteases do not recognize the PNA polyamide backbone with nucleobase sidechains. See, e.g., Ray et al., FASEB J. 14(9): 1041-60 (2000); Nielsen et al., Pharmacol Toxicol. 86(1): 3-7 (2000); Larsen et al., Biochim Biophys Acta. 1489(1): 159-66 (1999); Nielsen, Curr. Opin. Struct. Biol. 9(3): 353-7 (1999), and Nielsen, Curr. Opin. Biotechnol. 10(1): 71-5 (1999).

[0135] Nucleic acid molecules may be modified compared to their native structure throughout the length of the nucleic acid molecule or can be localized to discrete portions thereof. As an example of the latter, chimeric nucleic acids can be synthesized that have discrete DNA and RNA domains and that can be used for targeted gene repair and modified PCR reactions, as further described in, Misra et al., Biochem. 37: 1917-1925 (1998); and Finn et al., Nucl. Acids Res. 24: 3357-3363 (1996), and U.S. Pat. Nos. 5,760,012 and 5,731,181, the disclosures of which are incorporated herein by reference in their entireties.

[0136] Unless otherwise specified, nucleic acid molecules of the present invention can include any topological conformation appropriate to the desired use; the term thus explicitly comprehends, among others, single-stranded, double-stranded, triplexed, quadruplexed, partially double-stranded, partially-triplexed, partially-quadruplexed, branched, hairpinned, circular, and padlocked conformations. Padlock conformations and their utilities are further described in Banér et al., Curr. Opin. Biotechnol. 12: 11-15 (2001); Escude et al., Proc. Natl. Acad. Sci. USA 14: 96(19):10603-7 (1999); and Nilsson et al., Science 265(5181): 2085-8 (1994). Triplex and quadruplex conformations, and their utilities, are reviewed in Praseuth et al., Biochim. Biophys. Acta. 1489(1): 181-206 (1999); Fox, Curr. Med. Chem. 7(1): 17-37 (2000); Kochetkova et al., Methods Mol. Biol. 130: 189-201 (2000); Chan et al., J. Mol. Med. 75(4): 267-82 (1997); Rowley et al., Mol Med 5(10): 693-700 (1999); Kool, Annu Rev Biophys Biomol Struct. 25: 1-28 (1996).

[0137] Methods for Using Nucleic Acid Molecules as Probes and Primers

[0138] The isolated nucleic acid molecules of the present invention can be used as hybridization probes to detect, characterize, and quantify hybridizing nucleic acids in, and isolate hybridizing nucleic acids from, both genomic and transcript-derived nucleic acid samples. When free in solution, such probes are typically, but not invariably, detectably labeled; bound to a substrate, as in a microarray, such probes are typically, but not invariably unlabeled.

[0139] In one embodiment, the isolated nucleic acid molecules of the present invention can be used as probes to detect and characterize gross alterations in the gene of a ESNA, such as deletions, insertions, translocations, and duplications of the ESNA genomic locus through fluorescence in situ hybridization (FISH) to chromosome spreads. See, e.g., Andreeff et al. (eds.), Introduction to Fluorescence In Situ Hybridization: Principles and Clinical Applications, John Wiley & Sons (1999). The isolated nucleic acid molecules of the present invention can be used as probes to assess smaller genomic alterations using, e.g., Southern blot detection of restriction fragment length polymorphisms. The isolated nucleic acid molecules of the present invention can be used as probes to isolate genomic clones that include a nucleic acid molecule of the present invention, which thereafter can be restriction mapped and sequenced to identify deletions, insertions, translocations, and substitutions (single nucleotide polymorphisms, SNPs) at the sequence level. Alternatively, detection techniques such as molecular beacons may be used, see Kostrikis et al. Science 279:1228-1229 (1998).

[0140] The isolated nucleic acid molecules of the present invention can be also be used as probes to detect, characterize, and quantify ESNA in, and isolate ESNA from, transcript-derived nucleic acid samples. In one embodiment, the isolated nucleic acid molecules of the present invention can be used as hybridization probes to detect, characterize by length, and quantify mRNA by Northern blot of total or poly-A⁺-selected RNA samples. In another embodiment, the isolated nucleic acid molecules of the present invention can be used as hybridization probes to detect, characterize by location, and quantify mRNA by in situ hybridization to tissue sections. See, e.g., Schwarchzacher et al., In Situ Hybridization, Springer-Verlag New York (2000). In another preferred embodiment, the isolated nucleic acid molecules of the present invention can be used as hybridization probes to measure the representation of clones in a cDNA library or to isolate hybridizing nucleic acid molecules acids from cDNA libraries, permitting sequence level characterization of mRNAs that hybridize to ESNAs, including, without limitations, identification of deletions, insertions, substitutions, truncations, alternatively spliced forms and single nucleotide polymorphisms. In yet another preferred embodiment, the nucleic acid molecules of the instant invention may be used in microarrays.

[0141] All of the aforementioned probe techniques are well within the skill in the art, and are described at greater length in standard texts such as Sambrook (2001), supra; Ausubel (1999), supra; and Walker et al. (eds.), The Nucleic Acids Protocols Handbook, Humana Press (2000).

[0142] In another embodiment, a nucleic acid molecule of the invention may be used as a probe or primer to identify and/or amplify a second nucleic acid molecule that selectively hybridizes to the nucleic acid molecule of the invention. In this embodiment, it is preferred that the probe or primer be derived from a nucleic acid molecule encoding a ESP. More preferably, the probe or primer is derived from a nucleic acid molecule encoding a polypeptide having an amino acid sequence of SEQ ID NO: 473-666. Also preferred are probes or primers derived from a ESNA. More preferred are probes or primers derived from a nucleic acid molecule having a nucleotide sequence of SEQ ID NO: 1-472.

[0143] In general, a probe or primer is at least 10 nucleotides in length, more preferably at least 12, more preferably at least 14 and even more preferably at least 16 or 17 nucleotides in length. In an even more preferred embodiment, the probe or primer is at least 18 nucleotides in length, even more preferably at least 20 nucleotides and even more preferably at least 22 nucleotides in length. Primers and probes may also be longer in length. For instance, a probe or primer may be 25 nucleotides in length, or may be 30, 40 or 50 nucleotides in length. Methods of performing nucleic acid hybridization using oligonucleotide probes are well known in the art. See, e.g., Sambrook et al., 1989, supra, Chapter 11 and pp. 11.31-11.32 and 11.40-11.44, which describes radiolabeling of short probes, and pp. 11.45-11.53, which describe hybridization conditions for oligonucleotide probes, including specific conditions for probe hybridization (pp. 11.50-11.51).

[0144] Methods of performing primer-directed amplification are also well known in the art. Methods for performing the polymerase chain reaction (PCR) are compiled, inter alia, in McPherson, PCR Basics: From Background to Bench, Springer Verlag (2000); Innis et al. (eds.), PCR Applications: Protocols for Functional Genomics, Academic Press (1999); Gelfand et al. (eds.), PCR Strategies, Academic Press (1998); Newton et al., PCR, Springer-Verlag New York (1997); Burke (ed.), PCR: Essential Techniques, John Wiley & Son Ltd (1996); White (ed.), PCR Cloning Protocols: From Molecular Cloning to Genetic Engineering, Vol. 67, Humana Press (1996); and McPherson et al. (eds.), PCR 2: A Practical Approach, Oxford University Press, Inc. (1995). Methods for performing RT-PCR are collected, e.g., in Siebert et al. (eds.), Gene Cloning and Analysis by RT-PCR, Eaton Publishing Company/Bio Techniques Books Division, 1998; and Siebert (ed.), PCR Technique: RT-PCR, Eaton Publishing Company/BioTechniques Books (1995).

[0145] PCR and hybridization methods may be used to identify and/or isolate nucleic acid molecules of the present invention including allelic variants, homologous nucleic acid molecules and fragments. PCR and hybridization methods may also be used to identify, amplify and/or isolate nucleic acid molecules of the present invention that encode homologous proteins, analogs, fusion protein or muteins of the invention. Nucleic acid primers as described herein can be used to prime amplification of nucleic acid molecules of the invention, using transcript-derived or genomic DNA as template.

[0146] These nucleic acid primers can also be used, for example, to prime single base extension (SBE) for SNP detection (See, e.g., U.S. Pat. No. 6,004,744, the disclosure of which is incorporated herein by reference in its entirety).

[0147] Isothermal amplification approaches, such as rolling circle amplification, are also now well-described. See, e.g., Schweitzer et al., Curr. Opin. Biotechnol. 12(1): 21-7 (2001); international patent publications WO 97/19193 and WO 00/15779, and U.S. Pat. Nos. 5,854,033 and 5,714,320, the disclosures of which are incorporated herein by reference in their entireties. Rolling circle amplification can be combined with other techniques to facilitate SNP detection. See, e.g., Lizardi et al., Nature Genet. 19(3): 225-32 (1998).

[0148] Nucleic acid molecules of the present invention may be bound to a substrate either covalently or noncovalently. The substrate can be porous or solid, planar or non-planar, unitary or distributed. The bound nucleic acid molecules may be used as hybridization probes, and may be labeled or unlabeled. In a preferred embodiment, the bound nucleic acid molecules are unlabeled.

[0149] In one embodiment, the nucleic acid molecule of the present invention is bound to a porous substrate, e.g., a membrane, typically comprising nitrocellulose, nylon, or positively charged derivatized nylon. The nucleic acid molecule of the present invention can be used to detect a hybridizing nucleic acid molecule that is present within a labeled nucleic acid sample, e.g., a sample of transcript-derived nucleic acids. In another embodiment, the nucleic acid molecule is bound to a solid substrate, including, without limitation, glass, amorphous silicon, crystalline silicon or plastics. Examples of plastics include, without limitation, polymethylacrylic, polyethylene, polypropylene, polyacrylate, polymethylmethacrylate, polyvinylchloride, polytetrafluoroethylene, polystyrene, polycarbonate, polyacetal, polysulfone, celluloseacetate, cellulosenitrate, nitrocellulose, or mixtures thereof. The solid substrate may be any shape, including rectangular, disk-like and spherical. In a preferred embodiment, the solid substrate is a microscope slide or slide-shaped substrate.

[0150] The nucleic acid molecule of the present invention can be attached covalently to a surface of the support substrate or applied to a derivatized surface in a chaotropic agent that facilitates denaturation and adherence by presumed noncovalent interactions, or some combination thereof. The nucleic acid molecule of the present invention can be bound to a substrate to which a plurality of other nucleic acids are concurrently bound, hybridization to each of the plurality of bound nucleic acids being separately detectable. At low density, e.g. on a porous membrane, these substrate-bound collections are typically denominated macroarrays; at higher density, typically on a solid support, such as glass, these substrate bound collections of plural nucleic acids are colloquially termed microarrays. As used herein, the term microarray includes arrays of all densities. It is, therefore, another aspect of the invention to provide microarrays that comprise one or more of the nucleic acid molecules of the present invention.

[0151] In yet another embodiment, the invention is directed to single exon probes based on the ESNAs disclosed herein.

[0152] Expression Vectors, Host Cells and Recombinant Methods of Producing Polypeptides

[0153] Another aspect of the present invention provides vectors that comprise one or more of the isolated nucleic acid molecules of the present invention, and host cells in which such vectors have been introduced.

[0154] The vectors can be used, inter alia, for propagating the nucleic acid molecules of the present invention in host cells (cloning vectors), for shuttling the nucleic acid molecules of the present invention between host cells derived from disparate organisms (shuttle vectors), for inserting the nucleic acid molecules of the present invention into host cell chromosomes (insertion vectors), for expressing sense or antisense RNA transcripts of the nucleic acid molecules of the present invention in vitro or within a host cell, and for expressing polypeptides encoded by the nucleic acid molecules of the present invention, alone or as fusion proteins with heterologous polypeptides (expression vectors). Vectors are by now well known in the art, and are described, inter alia, in Jones et al. (eds.), Vectors: Cloning Applications: Essential Techniques (Essential Techniques Series), John Wiley & Son Ltd. (1998); Jones et al. (eds.), Vectors: Expression Systems: Essential Techniques (Essential Techniques Series), John Wiley & Son Ltd. (1998); Gacesa et at, Vectors: Essential Data, John Wiley & Sons Ltd. (1995); Cid-Arregui (eds.), Viral Vectors: Basic Science and Gene Therapy, Eaton Publishing Co. (2000); Sambrook (2001), supra; Ausubel (1999), supra. Furthermore, a variety of vectors are available commercially. Use of existing vectors and modifications thereof are well within the skill in the art. Thus, only basic features need be described here.

[0155] Nucleic acid sequences may be expressed by operatively linking them to an expression control sequence in an appropriate expression vector and employing that expression vector to transform an appropriate unicellular host. Expression control sequences are sequences that control the transcription, post-transcriptional events and translation of nucleic acid sequences. Such operative linking of a nucleic sequence of this invention to an expression control sequence, of course, includes, if not already part of the nucleic acid sequence, the provision of a translation initiation codon, ATG or GTG, in the correct reading frame upstream of the nucleic acid sequence.

[0156] A wide variety of host/expression vector combinations may be employed in expressing the nucleic acid sequences of this invention. Useful expression vectors, for example, may consist of segments of chromosomal, non-chromosomal and synthetic nucleic acid sequences.

[0157] In one embodiment, prokaryotic cells may be used with an appropriate vector. Prokaryotic host cells are often used for cloning and expression. In a preferred embodiment, prokaryotic host cells include E. coli, Pseudomonas, Bacillus and Streptomyces. In a preferred embodiment, bacterial host cells are used to express the nucleic acid molecules of the instant invention. Useful expression vectors for bacterial hosts include bacterial plasmids, such as those from E. coli, Bacillus or Streptomyces, including pBluescript, pGEX-2T, pUC vectors, col E1, pCR1, pBR322, pMB9 and their derivatives, wider host range plasmids, such as RP4, phage DNAs, e.g., the numerous derivatives of phage lambda, e.g., NM989, λGT10 and λGT11, and other phages, e.g., M13 and filamentous single stranded phage DNA. Where E. coli is used as host, selectable markers are, analogously, chosen for selectivity in gram negative bacteria: e.g., typical markers confer resistance to antibiotics, such as ampicillin, tetracycline, chloramphenicol, kanamycin, streptomycin and zeocin; auxotrophic markers can also be used.

[0158] In other embodiments, eukaryotic host cells, such as yeast, insect, mammalian or plant cells, may be used. Yeast cells, typically S. cerevisiae, are useful for eukaryotic genetic studies, due to the ease of targeting genetic changes by homologous recombination and the ability to easily complement genetic defects using recombinantly expressed proteins. Yeast cells are useful for identifying interacting protein components, e.g. through use of a two-hybrid system. In a preferred embodiment, yeast cells are useful for protein expression. Vectors of the present invention for use in yeast will typically, but not invariably, contain an origin of replication suitable for use in yeast and a selectable marker that is functional in yeast. Yeast vectors include Yeast Integrating plasmids (e.g., YIp5) and Yeast Replicating plasmids (the YRp and YEp series plasmids), Yeast Centromere plasmids (the YCp series plasmids), Yeast Artificial Chromosomes (YACs) which are based on yeast linear plasmids, denoted YLp, pGPD-2, 2μ plasmids and derivatives thereof, and improved shuttle vectors such as those described in Gietz et al., Gene, 74: 527-34 (1988) (YIplac, YEplac and YCplac). Selectable markers in yeast vectors include a variety of auxotrophic markers, the most common of which are (in Saccharomyces cerevisiae) URA3, HIS3, LEU2, TRP1 and LYS2, which complement specific auxotrophic mutations, such as ura3-52, his3-D1, leu2-D1, trp1-D1 and lys2-201.

[0159] Insect cells may be chosen for high efficiency protein expression. Where the host cells are from Spodoptera frugiperda, e.g., Sf9 and Sf21 cell lines, and expresSF™ cells (Protein Sciences Corp., Meriden, Conn., USA), the vector replicative strategy is typically based upon the baculovirus life cycle. Typically, baculovirus transfer vectors are used to replace the wild-type AcMNPV polyhedrin gene with a heterologous gene of interest. Sequences that flank the polyhedrin gene in the wild-type genome are positioned 5′ and 3′ of the expression cassette on the transfer vectors. Following co-transfection with AcMNPV DNA, a homologous recombination event occurs between these sequences resulting in a recombinant virus carrying the gene of interest and the polyhedrin or p10 promoter. Selection can be based upon visual screening for lacZ fusion activity.

[0160] The host cells may also be mammalian cells, which are particularly useful for expression of proteins intended as pharmaceutical agents, and for screening of potential agonists and antagonists of a protein or a physiological pathway. Mammalian vectors intended for autonomous extrachromosomal replication will typically include a viral origin, such as the SV40 origin (for replication in cell lines expressing the large T-antigen, such as COS1 and COS7 cells), the papillomavirus origin, or the EBV origin for long term episomal replication (for use, e.g., in 293-EBNA cells, which constitutively express the EBV EBNA-1 gene product and adenovirus E1A). Vectors intended for integration, and thus replication as part of the mammalian chromosome, can, but need not, include an origin of replication functional in mammalian cells, such as the SV40 origin. Vectors based upon viruses, such as adenovirus, adeno-associated virus, vaccinia virus, and various mammalian retroviruses, will typically replicate according to the viral replicative strategy. Selectable markers for use in mammalian cells include, include but are not limited to, resistance to neomycin (G418), blasticidin, hygromycin and zeocin, and selection based upon the purine salvage pathway using HAT medium.

[0161] Expression in mammalian cells can be achieved using a variety of plasmids, including pSV2, pBC12BI, and p91023, as well as lytic virus vectors (e.g. vaccinia virus, adeno virus, and baculovirus), episomal virus vectors (e.g., bovine papillomavirus), and retroviral vectors (e.g., murine retroviruses). Useful vectors for insect cells include baculoviral vectors and pVL941.

[0162] Plant cells can also be used for expression, with the vector replicon typically derived from a plant virus (e.g., cauliflower mosaic virus, CaMV; tobacco mosaic virus, TMV) and selectable markers chosen for suitability in plants.

[0163] It is known that codon usage of different host cells may be different. For example, a plant cell and a human cell may exhibit a difference in codon preference for encoding a particular amino acid. As a result, human mRNA may not be efficiently translated in a plant, bacteria or insect host cell. Therefore, another embodiment of this invention is directed to codon optimization. The codons of the nucleic acid molecules of the invention may be modified to resemble, as much as possible, genes naturally contained within the host cell without altering the amino acid sequence encoded by the nucleic acid molecule.

[0164] Any of a wide variety of expression control sequences may be used in these vectors to express the nucleic acid molecules of this invention. Such useful expression control sequences include the expression control sequences associated with structural genes of the foregoing expression vectors. Expression control sequences that control transcription include, e.g., promoters, enhancers and transcription termination sites. Expression control sequences in eukaryotic cells that control post-transcriptional events include splice donor and acceptor sites and sequences that modify the half-life of the transcribed RNA, e.g., sequences that direct poly(A) addition or binding sites for RNA-binding proteins. Expression control sequences that control translation include ribosome binding sites, sequences which direct targeted expression of the polypeptide to or within particular cellular compartments, and sequences in the 5′ and 3′ untranslated regions that modify the rate or efficiency of translation.

[0165] Examples of useful expression control sequences for a prokaryote, e.g., E. coli, will include a promoter, often a phage promoter, such as phage lambda pL promoter, the trc promoter, a hybrid derived from the trp and lac promoters, the bacteriophage T7 promoter (in E. coli cells engineered to express the T7 polymerase), the TAC or TRC system, the major operator and promoter regions of phage lambda, the control regions of fd coat protein, and the araBAD operon. Prokaryotic expression vectors may further include transcription terminators, such as the aspA terminator, and elements that facilitate translation, such as a consensus ribosome binding site and translation termination codon, Schomer et al., Proc. Natl. Acad. Sci. USA 83: 8506-8510 (1986).

[0166] Expression control sequences for yeast cells, typically S. cerevisiae, will include a yeast promoter, such as the CYC1 promoter, the GAL1 promoter, the GAL10 promoter, ADH1 promoter, the promoters of the yeast α-mating system, or the GPD promoter, and will typically have elements that facilitate transcription termination, such as the transcription termination signals from the CYC1 or ADH1 gene.

[0167] Expression vectors useful for expressing proteins in mammalian cells will include a promoter active in mammalian cells. These promoters include, but are not limited to, those derived from mammalian viruses, such as the enhancer-promoter sequences from the immediate early gene of the human cytomegalovirus (CMV), the enhancer-promoter sequences from the Rous sarcoma virus long terminal repeat (RSV LTR), the enhancer-promoter from SV40 and the early and late promoters of adenovirus. Other expression control sequences include the promoter for 3-phosphoglycerate kinase or other glycolytic enzymes, the promoters of acid phosphatase. Other expression control sequences include those from the gene comprising the ESNA of interest. Often, expression is enhanced by incorporation of polyadenylation sites, such as the late SV40 polyadenylation site and the polyadenylation signal and transcription termination sequences from the bovine growth hormone (BGH) gene, and ribosome binding sites. Furthermore, vectors can include introns, such as intron II of rabbit β-globin gene and the SV40 splice elements.

[0168] Preferred nucleic acid vectors also include a selectable or amplifiable marker gene and means for amplifying the copy number of the gene of interest. Such marker genes are well known in the art. Nucleic acid vectors may also comprise stabilizing sequences (e.g., ori- or ARS-like sequences and telomere-like sequences), or may alternatively be designed to favor directed or non-directed integration into the host cell genome. In a preferred embodiment, nucleic acid sequences of this invention are inserted in frame into an expression vector that allows a high level expression of an RNA which encodes a protein comprising the encoded nucleic acid sequence of interest. Nucleic acid cloning and sequencing methods are well known to those of skill in the art and are described in an assortment of laboratory manuals, including Sambrook (1989), supra, Sambrook (2000), supra; and Ausubel (1992), supra, Ausubel (1999), supra. Product information from manufacturers of biological, chemical and immunological reagents also provide useful information.

[0169] Expression vectors may be either constitutive or inducible. Inducible vectors include either naturally inducible promoters, such as the trc promoter, which is regulated by the lac operon, and the pL promoter, which is regulated by tryptophan, the MMTV-LTR promoter, which is inducible by dexamethasone, or can contain synthetic promoters and/or additional elements that confer inducible control on adjacent promoters. Examples of inducible synthetic promoters are the hybrid Plac/ara-1 promoter and the PLtetO-1 promoter. The PLtetO-1 promoter takes advantage of the high expression levels from the PL promoter of phage lambda, but replaces the lambda repressor sites with two copies of operator 2 of the Tn10 tetracycline resistance operon, causing this promoter to be tightly repressed by the Tet repressor protein and induced in response to tetracycline (Tc) and Tc derivatives such as anhydrotetracycline. Vectors may also be inducible because they contain hormone response elements, such as the glucocorticoid response element (GRE) and the estrogen response element (ERE), which can confer hormone inducibility where vectors are used for expression in cells having the respective hormone receptors. To reduce background levels of expression, elements responsive to ecdysone, an insect hormone, can be used instead, with coexpression of the ecdysone receptor.

[0170] In one embodiment of the invention, expression vectors can be designed to fuse the expressed polypeptide to small protein tags that facilitate purification and/or visualization. Such tags include a polyhistidine tag that facilitates purification of the fusion protein by immobilized metal affinity chromatography, for example using NiNTA resin (Qiagen Inc., Valencia, Calif., USA) or TALON™ resin (cobalt immobilized affinity chromatography medium, Clontech Labs, Palo Alto, Calif., USA). The fusion protein can include a chitin-binding tag and self-excising intein, permitting chitin-based purification with self-removal of the fused tag (IMPACT™ system, New England Biolabs, Inc., Beverley, Mass., USA). Alternatively, the fusion protein can include a calmodulin-binding peptide tag, permitting purification by calmodulin affinity resin (Stratagene, La Jolla, Calif., USA), or a specifically excisable fragment of the biotin carboxylase carrier protein, permitting purification of in vivo biotinylated protein using an avidin resin and subsequent tag removal (Promega, Madison, Wis., USA). As another useful alternative, the polypeptides of the present invention can be expressed as a fusion to glutathione-S-transferase, the affinity and specificity of binding to glutathione permitting purification using glutathione affinity resins, such as Glutathione-Superflow Resin (Clontech Laboratories, Palo Alto, Calif., USA), with subsequent elution with free glutathione. Other tags include, for example, the Xpress epitope, detectable by anti-Xpress antibody (Invitrogen, Carlsbad, Calif., USA), a myc tag, detectable by anti-myc tag antibody, the V5 epitope, detectable by anti-V5 antibody (Invitrogen, Carlsbad, Calif., USA), FLAG® epitope, detectable by anti-FLAG® antibody (Stratagene, La Jolla, Calif., USA), and the HA epitope, detectable by anti-HA antibody.

[0171] For secretion of expressed polypeptides, vectors can include appropriate sequences that encode secretion signals, such as leader peptides. For example, the pSecTag2 vectors (Invitrogen, Carlsbad, Calif., USA) are 5.2 kb mammalian expression vectors that carry the secretion signal from the V-J2-C region of the mouse Ig kappa-chain for efficient secretion of recombinant proteins from a variety of mammalian cell lines.

[0172] Expression vectors can also be designed to fuse proteins encoded by the heterologous nucleic acid insert to polypeptides that are larger than purification and/or identification tags. Useful protein fusions include those that permit display of the encoded protein on the surface of a phage or cell, fusions to intrinsically fluorescent proteins, such as those that have a green fluorescent protein (GFP)-like chromophore, fusions to the IgG Fc region, and fusions for use in two hybrid systems.

[0173] Vectors for phage display fuse the encoded polypeptide to, e.g., the gene III protein (pIII) or gene VIII protein (pVIII) for display on the surface of filamentous phage, such as M13. See Barbas et al., Phage Display: A Laboratory Manual, Cold Spring Harbor Laboratory Press (2001); Kay et al. (eds.), Phage Display of Peptides and Proteins: A Laboratory Manual, Academic Press, Inc., (1996); Abelson et al. (eds.), Combinatorial Chemistry (Methods in Enzymology, Vol. 267) Academic Press (1996). Vectors for yeast display, e.g. the pYD1 yeast display vector (Invitrogen, Carlsbad, Calif., USA), use the α-agglutinin yeast adhesion receptor to display recombinant protein on the surface of S. cerevisiae. Vectors for mammalian display, e.g., the pDisplay™ vector (Invitrogen, Carlsbad, Calif., USA), target recombinant proteins using an N-terminal cell surface targeting signal and a C-terminal transmembrane anchoring domain of platelet derived growth factor receptor.

[0174] A wide variety of vectors now exist that fuse proteins encoded by heterologous nucleic acids to the chromophore of the substrate-independent, intrinsically fluorescent green fluorescent protein from Aequorea victoria (“GFP”) and its variants. The GFP-like chromophore can be selected from GFP-like chromophores found in naturally occurring proteins, such as A. Victoria GFP (GenBank accession number AAA27721), Renilla reniformis GFP, FP583 (GenBank accession no. AF168419) (DsRed), FP593 (AF272711), FP483 (AF168420), FP484 (AF168424), FP595 (AF246709), FP486 (AF168421), FP538 (AF168423), and FP506 (AF168422), and need include only so much of the native protein as is needed to retain the chromophore's intrinsic fluorescence. Methods for determining the minimal domain required for fluorescence are known in the art. See Li et al., J. Biol. Chem. 272: 28545-28549 (1997). Alternatively, the GFP-like chromophore can be selected from GFP-like chromophores modified from those found in nature. The methods for engineering such modified GFP-like chromophores and testing them for fluorescence activity, both alone and as part of protein fusions, are well known in the art. See Heim et al., Curr. Biol. 6: 178-182 (1996) and Palm et al., Methods Enzymol. 302: 378-394 (1999). A variety of such modified chromophores are now commercially available and can readily be used in the fusion proteins of the present invention. These include EGFP (“enhanced GFP”), EBFP (“enhanced blue fluorescent protein”), BFP2, EYFP (“enhanced yellow fluorescent protein”), ECFP (“enhanced cyan fluorescent protein”) or Citrine. EGFP (see, e.g, Cormack et al., Gene 173: 33-38 (1996); U.S. Pat. Nos. 6,090,919 and 5,804,387, the disclosures of which are incorporated herein by reference in their entireties) is found on a variety of vectors, both plasmid and viral, which are available commercially (Clontech Labs, Palo Alto, Calif., USA); EBFP is optimized for expression in mammalian cells whereas BFP2, which retains the original jellyfish codons, can be expressed in bacteria (see, e.g, Heim et al., Curr. Biol. 6: 178-182 (1996) and Cormack et al., Gene 173: 33-38 (1996)). Vectors containing these blue-shifted variants are available from Clontech Labs (Palo Alto, Calif., USA). Vectors containing EYFP, ECFP (see, e.g., Heim et al., Curr. Biol. 6: 178-182 (1996); Miyawaki et al., Nature 388: 882-887 (1997)) and Citrine (see, e.g., Heikal et al., Proc. Natl. Acad. Sci. USA 97: 11996-12001 (2000)) are also available from Clontech Labs. The GFP-like chromophore can also be drawn from other modified GFPs, including those described in U.S. Pat. Nos. 6,124,128; 6,096,865; 6,090,919; 6,066,476; 6,054,321; 6,027,881; 5,968,750; 5,874,304; 5,804,387; 5,777,079; 5,741,668; and 5,625,048, the disclosures of which are incorporated herein by reference in their entireties. See also Conn (ed.), Green Fluorescent Protein (Methods in Enzymology, Vol. 302), Academic Press, Inc. (1999); Yang, et al., J Biol Chem, 273: 8212-6 (1998); Bevis et al., Nature Biotechnology, 20:83-7 (2002). The GFP-like chromophore of each of these GFP variants can usefully be included in the fusion proteins of the present invention.

[0175] Fusions to the IgG Fc region increase serum half-life of protein pharmaceutical products through interaction with the FcRn receptor (also denominated the FcRp receptor and the Brambell receptor, FcRb), further described in International Patent Application nos. WO 97/43316, WO 97/34631, WO 96/32478, WO 96/18412, the disclosures of which are incorporated herein by reference in their entireties.

[0176] For long-term, high-yield recombinant production of the polypeptides of the present invention, stable expression is preferred. Stable expression is readily achieved by integration into the host cell genome of vectors having selectable markers, followed by selection of these integrants. Vectors such as pUB6N5-His A, B, and C (Invitrogen, Carlsbad, Calif., USA) are designed for high-level stable expression of heterologous proteins in a wide range of mammalian tissue types and cell lines. pUB6N5-His uses the promoter/enhancer sequence from the human ubiquitin C gene to drive expression of recombinant proteins: expression levels in 293, CHO, and NIH3T3 cells are comparable to levels from the CMV and human EF-1a promoters. The bsd gene permits rapid selection of stably transfected mammalian cells with the potent antibiotic blasticidin.

[0177] Replication incompetent retroviral vectors, typically derived from Moloney murine leukemia virus, also are useful for creating stable transfectants having integrated provirus. The highly efficient transduction machinery of retroviruses, coupled with the availability of a variety of packaging cell lines such as RetroPack™ PT 67, EcoPac2™-293, AmphoPack-293, and GP2-293 cell lines (all available from Clontech Laboratories, Palo Alto, Calif., USA) allow a wide host range to be infected with high efficiency; varying the multiplicity of infection readily adjusts the copy number of the integrated provirus.

[0178] Of course, not all vectors and expression control sequences will function equally well to express the nucleic acid molecules of this invention. Neither will all hosts function equally well with the same expression system. However, one of skill in the art may make a selection among these vectors, expression control sequences and hosts without undue experimentation and without departing from the scope of this invention. For example, in selecting a vector, the host must be considered because the vector must be replicated in it. The vector's copy number, the ability to control that copy number, the ability to control integration, if any, and the expression of any other proteins encoded by the vector, such as antibiotic or other selection markers, should also be considered. The present invention further includes host cells comprising the vectors of the present invention, either present episomally within the cell or integrated, in whole or in part, into the host cell chromosome. Among other considerations, some of which are described above, a host cell strain may be chosen for its ability to process the expressed polypeptide in the desired fashion. Such post-translational modifications of the polypeptide include, but are not limited to, acetylation, carboxylation, glycosylation, phosphorylation, lipidation, and acylation, and it is an aspect of the present invention to provide ESPs with such post-translational modifications.

[0179] In selecting an expression control sequence, a variety of factors should also be considered. These include, for example, the relative strength of the sequence, its controllability, and its compatibility with the nucleic acid molecules of this invention, particularly with regard to potential secondary structures. Unicellular hosts should be selected by consideration of their compatibility with the chosen vector, the toxicity of the product coded for by the nucleic acid sequences of this invention, their secretion characteristics, their ability to fold the polypeptide correctly, their fermentation or culture requirements, and the ease of purification from them of the products coded for by the nucleic acid molecules of this invention.

[0180] The recombinant nucleic acid molecules and more particularly, the expression vectors of this invention may be used to express the polypeptides of this invention as recombinant polypeptides in a heterologous host cell. The polypeptides of this invention may be full-length or less than full-length polypeptide fragments recombinantly expressed from the nucleic acid molecules according to this invention. Such polypeptides include analogs, derivatives and muteins that may or may not have biological activity.

[0181] Vectors of the present invention will also often include elements that permit in vitro transcription of RNA from the inserted heterologous nucleic acid. Such vectors typically include a phage promoter, such as that from T7, T3, or SP6, flanking the nucleic acid insert. Often two different such promoters flank the inserted nucleic acid, permitting separate in vitro production of both sense and antisense strands.

[0182] Transformation and other methods of introducing nucleic acids into a host cell (e.g., conjugation, protoplast transformation or fusion, transfection, electroporation, liposome delivery, membrane fusion techniques, high velocity DNA-coated pellets, viral infection and protoplast fusion) can be accomplished by a variety of methods which are well known in the art (See, for instance, Ausubel, supra, and Sambrook et al., supra). Bacterial, yeast, plant or mammalian cells are transformed or transfected with an expression vector, such as a plasmid, a cosmid, or the like, wherein the expression vector comprises the nucleic acid of interest. Alternatively, the cells may be infected by a viral expression vector comprising the nucleic acid of interest. Depending upon the host cell, vector, and method of transformation used, transient or stable expression of the polypeptide will be constitutive or inducible. One having ordinary skill in the art will be able to decide whether to express a polypeptide transiently or stably, and whether to express the protein constitutively or inducibly.

[0183] A wide variety of unicellular host cells are useful in expressing the DNA sequences of this invention. These hosts may include well known eukaryotic and prokaryotic hosts, such as strains of, fungi, yeast, insect cells such as Spodoptera frugiperda (SF9), animal cells such as CHO, as well as plant cells in tissue culture. Representative examples of appropriate host cells include, but are not limited to, bacterial cells, such as E. coli, Caulobacter crescentus, Streptomyces species, and Salmonella typhimurium; yeast cells, such as Saccharomyces cerevisiae, Schizosaccharomyces pombe, Pichia pastoris, Pichia methanolica; insect cell lines, such as those from Spodoptera frugiperda—e.g., Sf9 and Sf21 cell lines, and expresSF™ cells (Protein Sciences Corp., Meriden, Conn., USA)—Drosophila S2 cells, and Trichoplusia ni High Five® Cells (Invitrogen, Carlsbad, Calif., USA); and mammalian cells. Typical mammalian cells include BHK cells, BSC 1 cells, BSC 40 cells, BMT 10 cells, VERO cells, COS1 cells, COS7 cells, Chinese hamster ovary (CHO) cells, 3T3 cells, NIH 3T3 cells, 293 cells, HEPG2 cells, HeLa cells, L cells, MDCK cells, HEK293 cells, WI38 cells, murine ES cell lines (e.g., from strains 129/SV, C57/BL6, DBA-1, 129/SVJ), K562 cells, Jurkat cells, and BW5147 cells. Other mammalian cell lines are well known and readily available from the American Type Culture Collection (ATCC) (Manassas, Va., USA) and the National Institute of General Medical Sciences (NIGMS) Human Genetic Cell Repository at the Coriell Cell Repositories (Camden, N.J., USA). Cells or cell lines derived from endometrial are particularly preferred because they may provide a more native post-translational processing. Particularly preferred are human endometrial cells.

[0184] Particular details of the transfection, expression and purification of recombinant proteins are well documented and are understood by those of skill in the art. Further details on the various technical aspects of each of the steps used in recombinant production of foreign genes in bacterial cell expression systems can be found in a number of texts and laboratory manuals in the art. See, e.g., Ausubel (1992), supra, Ausubel (1999), supra, Sambrook (1989), supra, and Sambrook (2001), supra.

[0185] Methods for introducing the vectors and nucleic acid molecules of the present invention into the host cells are well known in the art; the choice of technique will depend primarily upon the specific vector to be introduced and the host cell chosen.

[0186] Nucleic acid molecules and vectors may be introduced into prokaryotes, such as E. coli, in a number of ways. For instance, phage lambda vectors will typically be packaged using a packaging extract (e.g., Gigapack® packaging extract, Stratagene, La Jolla, Calif., USA), and the packaged virus used to infect E. coli.

[0187] Plasmid vectors will typically be introduced into chemically competent or electrocompetent bacterial cells. E. coli cells can be rendered chemically competent by treatment, e.g., with CaCl₂, or a solution of Mg²⁺, Mn²⁺, Ca²⁺, Rb⁺ or K⁺, dimethyl sulfoxide, dithiothreitol, and hexamine cobalt (III), Hanahan, J. Mol. Biol. 166(4):557-80 (1983), and vectors introduced by heat shock. A wide variety of chemically competent strains are also available commercially (e.g., Epicurian Coli® XL10-Gold® Ultracompetent Cells (Stratagene, La Jolla, Calif., USA); DH5α competent cells (Clontech Laboratories, Palo Alto, Calif., USA); and TOP10 Chemically Competent E. coli Kit (Invitrogen, Carlsbad, Calif., USA)). Bacterial cells can be rendered electrocompetent to take up exogenous DNA by electroporation by various pre-pulse treatments; vectors are introduced by electroporation followed by subsequent outgrowth in selected media. An extensive series of protocols is provided by BioRad (Richmond, Calif., USA).

[0188] Vectors can be introduced into yeast cells by spheroplasting, treatment with lithium salts, electroporation, or protoplast fusion. Spheroplasts are prepared by the action of hydrolytic enzymes such as a snail-gut extract, usually denoted Glusulase or Zymolyase, or an enzyme from Arthrobacter luteus to remove portions of the cell wall in the presence of osmotic stabilizers, typically 1 M sorbitol. DNA is added to the spheroplasts, and the mixture is co-precipitated with a solution of polyethylene glycol (PEG) and Ca²⁺. Subsequently, the cells are resuspended in a solution of sorbitol, mixed with molten agar and then layered on the surface of a selective plate containing sorbitol.

[0189] For lithium-mediated transformation, yeast cells are treated with lithium acetate to permeabilize the cell wall, DNA is added and the cells are co-precipitated with PEG. The cells are exposed to a brief heat shock, washed free of PEG and lithium acetate, and subsequently spread on plates containing ordinary selective medium. Increased frequencies of transformation are obtained by using specially-prepared single-stranded carrier DNA and certain organic solvents. Schiestl et al., Curr. Genet. 16(5-6): 339-46 (1989).

[0190] For electroporation, freshly-grown yeast cultures are typically washed, suspended in an osmotic protectant, such as sorbitol, mixed with DNA, and the cell suspension pulsed in an electroporation device. Subsequently, the cells are spread on the surface of plates containing selective media. Becker et al., Methods Enzymol. 194: 182-187 (1991). The efficiency of transformation by electroporation can be increased over 100-fold by using PEG, single-stranded carrier DNA and cells that are in late log-phase of growth. Larger constructs, such as YACs, can be introduced by protoplast fusion.

[0191] Mammalian and insect cells can be directly infected by packaged viral vectors, or transfected by chemical or electrical means. For chemical transfection, DNA can be coprecipitated with CaPO₄ or introduced using liposomal and nonliposomal lipid-based agents. Commercial kits are available for CaPO₄ transfection (CalPhos™ Mammalian Transfection Kit, Clontech Laboratories, Palo Alto, Calif., USA), and lipid-mediated transfection can be practiced using commercial reagents, such as LIPOFECTAMINE™ 2000, LIPOFECTAMINE™ Reagent, CELLFECTIN® Reagent, and LIPOFECTIN® Reagent (Invitrogen, Carlsbad, Calif., USA), DOTAP Liposomal Transfection Reagent, FuGENE 6, X-tremeGENE Q2, DOSPER, (Roche Molecular Biochemicals, Indianapolis, Ind. USA), Effectene™, PolyFect®, Superfect® (Qiagen, Inc., Valencia, Calif., USA). Protocols for electroporating mammalian cells can be found in, for example, Norton et al. (eds.), Gene Transfer Methods: Introducing DNA into Living Cells and Organisms, BioTechniques Books, Eaton Publishing Co. (2000). Other transfection techniques include transfection by particle bombardment and microinjection. See, e.g., Cheng et al., Proc. Natl. Acad. Sci. USA 90(10): 4455-9 (1993); Yang et al., Proc. Natl. Acad. Sci. USA 87(24): 9568-72 (1990).

[0192] Production of the recombinantly produced proteins of the present invention can optionally be followed by purification.

[0193] Purification of recombinantly expressed proteins is now well within the skill in the art and thus need not be detailed here. See, e.g., Thorner et al. (eds.), Applications of Chimeric Genes and Hybrid Proteins. Part A: Gene Expression and Protein Purification (Methods in Enzymology, Vol. 326), Academic Press (2000); Harbin (ed.), Cloning, Gene Expression and Protein Purification: Experimental Procedures and Process Rationale, Oxford Univ. Press (2001); Marshak et al., Strategies for Protein Purification and Characterization: A Laboratory Course Manual, Cold Spring Harbor Laboratory Press (1996); and Roe (ed.), Protein Purification Applications, Oxford University Press (2001).

[0194] Briefly, however, if purification tags have been fused through use of an expression vector that appends such tag, purification can be effected, at least in part, by means appropriate to the tag, such as use of immobilized metal affinity chromatography for polyhistidine tags. Other techniques common in the art include ammonium sulfate fractionation, immunoprecipitation, fast protein liquid chromatography (FPLC), high performance liquid chromatography (HPLC), and preparative gel electrophoresis.

Polypeptides, Including Fragments Muteins, Homologous Proteins. Allelic Variants, Analogs and Derivatives

[0195] Another aspect of the invention relates to polypeptides encoded by the nucleic acid molecules described herein. In a preferred embodiment, the polypeptide is a endometrial specific polypeptide (ESP). In an even more preferred embodiment, the polypeptide comprises an amino acid sequence of SEQ ID NO:473-666 or is derived from a polypeptide having the amino acid sequence of SEQ ID NO: 473-666. A polypeptide as defined herein may be produced recombinantly, as discussed supra, may be isolated from a cell that naturally expresses the protein, or may be chemically synthesized following the teachings of the specification and using methods well known to those having ordinary skill in the art.

[0196] Polypeptides of the present invention may also comprise a part or fragment of a ESP. In a preferred embodiment, the fragment is derived from a polypeptide having an amino acid sequence selected from the group consisting of SEQ ID NO: 473-666. Polypeptides of the present invention comprising a part or fragment of an entire ESP may or may not be ESPs. For example, a full-length polypeptide may be endometrial-specific, while a fragment thereof may be found in other tissues as well as in endometrial. A polypeptide that is not a ESP, whether it is a fragment, analog, mutein, homologous protein or derivative, is nevertheless useful, especially for immunizing animals to prepare anti-ESP antibodies. In a preferred embodiment, the part or fragment is a ESP. Methods of determining whether a polypeptide of the present invention is a ESP are described infra.

[0197] Polypeptides of the present invention comprising fragments of at least 6 contiguous amino acids are also useful in mapping B cell and T cell epitopes of the reference protein. See, e.g., Geysen et al., Proc. Natl. Acad. Sci. USA 81: 3998-4002 (1984) and U.S. Pat. Nos. 4,708,871 and 5,595,915, the disclosures of which are incorporated herein by reference in their entireties. Because the fragment need not itself be immunogenic, part of an immunodominant epitope, nor even recognized by native antibody, to be useful in such epitope mapping, all fragments of at least 6 amino acids of a polypeptide of the present invention have utility in such a study.

[0198] Polypeptides of the present invention comprising fragments of at least 8 contiguous amino acids, often at least 15 contiguous amino acids, are useful as immunogens for raising antibodies that recognize polypeptides of the present invention. See, e.g., Lerner, Nature 299: 592-596 (1982); Shinnick et al., Annu. Rev. Microbiol. 37: 425-46 (1983); Sutcliffe et al., Science 219: 660-6 (1983). As further described in the above-cited references, virtually all 8-mers, conjugated to a carrier, such as a protein, prove immunogenic and are capable of eliciting antibody for the conjugated peptide; accordingly, all fragments of at least 8 amino acids of the polypeptides of the present invention have utility as immunogens.

[0199] Polypeptides comprising fragments of at least 8, 9, 10 or 12 contiguous amino acids are also useful as competitive inhibitors of binding of the entire polypeptide, or a portion thereof, to antibodies (as in epitope mapping), and to natural binding partners, such as subunits in a multimeric complex or to receptors or ligands of the subject protein; this competitive inhibition permits identification and separation of molecules that bind specifically to the polypeptide of interest. See U.S. Pat. Nos. 5,539,084 and 5,783,674, incorporated herein by reference in their entireties.

[0200] The polypeptide of the present invention thus preferably is at least 6 amino acids in length, typically at least 8, 9, 10 or 12 amino acids in length, and often at least 15 amino acids in length. Often, the polypeptide of the present invention is at least 20 amino acids in length, even 25 amino acids, 30 amino acids, 35 amino acids, or 50 amino acids or more in length. Of course, larger polypeptides having at least 75 amino acids, 100 amino acids, or even 150 amino acids are also useful, and at times preferred.

[0201] One having ordinary skill in the art can produce fragments by truncating the nucleic acid molecule, e.g., a ESNA, encoding the polypeptide and then expressing it recombinantly. Alternatively, one can produce a fragment by chemically synthesizing a portion of the full-length polypeptide. One may also produce a fragment by enzymatically cleaving either a recombinant polypeptide or an isolated naturally occurring polypeptide. Methods of producing polypeptide fragments are well known in the art. See, e.g., Sambrook (1989), supra; Sambrook (2001), supra; Ausubel (1992), supra; and Ausubel (1999), supra. In one embodiment, a polypeptide comprising only a fragment, preferably a fragment of a ESP, may be produced by chemical or enzymatic cleavage of a ESP polypeptide. In a preferred embodiment, a polypeptide fragment is produced by expressing a nucleic acid molecule of the present invention encoding a fragment, preferably of a ESP, in a host cell.

[0202] Polypeptides of the present invention are also inclusive of mutants, fusion proteins, homologous proteins and allelic variants.

[0203] A mutant protein, or mutein, may have the same or different properties compared to a naturally occurring polypeptide and comprises at least one amino acid insertion, duplication, deletion, rearrangement or substitution compared to the amino acid sequence of a native polypeptide. Small deletions and insertions can often be found that do not alter the function of a protein. Muteins may or may not be endometrial-specific. Preferably, the mutein is endometrial-specific. More preferably the mutein is a polypeptide that comprises at least one amino acid insertion, duplication, deletion, rearrangement or substitution compared to the amino acid sequence of SEQ ID NO: 473-666. Accordingly, in a preferred embodiment, the mutein is one that exhibits at least 50% sequence identity, more preferably at least 60% sequence identity, even more preferably at least 70%, yet more preferably at least 80% sequence identity to a ESP comprising an amino acid sequence of SEQ ID NO: 473-666. In a yet more preferred embodiment, the mutein exhibits at least 85%, more preferably 90%, even more preferably 95% or 96%, and yet more preferably at least 97%, 98%, 99% or 99.5% sequence identity to a ESP comprising an amino acid sequence of SEQ ID NO: 473-666.

[0204] A mutein may be produced by isolation from a naturally occurring mutant cell, tissue or organism. A mutein may be produced by isolation from a cell, tissue or organism that has been experimentally mutagenized. Alternatively, a mutein may be produced by chemical manipulation of a polypeptide, such as by altering the amino acid residue to another amino acid residue using synthetic or semi-synthetic chemical techniques. In a preferred embodiment, a mutein is produced from a host cell comprising a mutated nucleic acid molecule compared to the naturally occurring nucleic acid molecule. For instance, one may produce a mutein of a polypeptide by introducing one or more mutations into a nucleic acid molecule of the invention and then expressing it recombinantly. These mutations may be targeted, in which particular encoded amino acids are altered, or may be untargeted, in which random encoded amino acids within the polypeptide are altered. Muteins with random amino acid alterations can be screened for a particular biological activity or property, particularly whether the polypeptide is endometrial-specific, as described below. Multiple random mutations can be introduced into the gene by methods well known to the art, e.g., by error-prone PCR, shuffling, oligonucleotide-directed mutagenesis, assembly PCR, sexual PCR mutagenesis, in vivo mutagenesis, cassette mutagenesis, recursive ensemble mutagenesis, exponential ensemble mutagenesis and site-specific mutagenesis. Methods of producing muteins with targeted or random amino acid alterations are well known in the art. See, e.g., Sambrook (1989), supra; Sambrook (2001), supra; Ausubel (1992), supra; and Ausubel (1999), as well as U.S. Pat. No. 5,223,408, which is herein incorporated by reference in its entirety.

[0205] The invention also contemplates polypeptides that are homologous to a polypeptide of the invention. In a preferred embodiment, the polypeptide is homologous to a ESP. In an even more preferred embodiment, the polypeptide is homologous to a ESP selected from the group having an amino acid sequence of SEQ ID NO: 473-666. By homologous polypeptide it is means one that exhibits significant sequence identity to a ESP, preferably a ESP having an amino acid sequence of SEQ ID NO: 473-666. By significant sequence identity it is meant that the homologous polypeptide exhibits at least 50% sequence identity, more preferably at least 60% sequence identity, even more preferably at least 70%, yet more preferably at least 80% sequence identity to a ESP comprising an amino acid sequence of SEQ ID NO: 473-666. More preferred are homologous polypeptides exhibiting at least 85%, more preferably 90%, even more preferably 95% or 96%, and yet more preferably at least 97% or 98% sequence identity to a ESP comprising an amino acid sequence of SEQ ID NO: 473-666. Most preferably, the homologous polypeptide exhibits at least 99%, more preferably 99.5%, even more preferably 99.6%, 99.7%, 99.8% or 99.9% sequence identity to a ESP comprising an amino acid sequence of SEQ ID NO: 473-666. In a preferred embodiment, the amino acid substitutions of the homologous polypeptide are conservative amino acid substitutions as discussed above.

[0206] Homologous polypeptides of the present invention also comprise polypeptide encoded by a nucleic acid molecule that selectively hybridizes to a ESNA or an antisense sequence thereof. In this embodiment, it is preferred that the homologous polypeptide be encoded by a nucleic acid molecule that hybridizes to a ESNA under low stringency, moderate stringency or high stringency conditions, as defined herein. More preferred is a homologous polypeptide encoded by a nucleic acid sequence which hybridizes to a ESNA selected from the group consisting of SEQ ID NO: 1-472 or a homologous polypeptide encoded by a nucleic acid molecule that hybridizes to a nucleic acid molecule that encodes a ESP, preferably an ESP of SEQ ID NO:473-666 under low stringency, moderate stringency or high stringency conditions, as defined herein.

[0207] Homologous polypeptides of the present invention may be naturally occurring and derived from another species, especially one derived from another primate, such as chimpanzee, gorilla, rhesus macaque, or baboon, wherein the homologous polypeptide comprises an amino acid sequence that exhibits significant sequence identity to that of SEQ ID NO: 473-666. The homologous polypeptide may also be a naturally occurring polypeptide from a human, when the ESP is a member of a family of polypeptides. The homologous polypeptide may also be a naturally occurring polypeptide derived from a non-primate, mammalian species, including without limitation, domesticated species, e.g., dog, cat, mouse, rat, rabbit, guinea pig, hamster, cow, horse, goat or pig. The homologous polypeptide may also be a naturally occurring polypeptide derived from a non-mammalian species, such as birds or reptiles. The naturally occurring homologous protein may be isolated directly from humans or other species. Alternatively, the nucleic acid molecule encoding the naturally occurring homologous polypeptide may be isolated and used to express the homologous polypeptide recombinantly. The homologous polypeptide may also be one that is experimentally produced by random mutation of a nucleic acid molecule and subsequent expression of the nucleic acid molecule. Alternatively, the homologous polypeptide may be one that is experimentally produced by directed mutation of one or more codons to alter the encoded amino acid of a ESP. In a preferred embodiment, the homologous polypeptide encodes a polypeptide that is a ESP.

[0208] Relatedness of proteins can also be characterized using a second functional test, the ability of a first protein competitively to inhibit the binding of a second protein to an antibody. It is, therefore, another aspect of the present invention to provide isolated polpeptide not only identical in sequence to those described with particularity herein, but also to provide isolated polypeptide (“cross-reactive proteins”) that competitively inhibit the binding of antibodies to all or to a portion of various of the isolated polypeptides of the present invention. Such competitive inhibition can readily be determined using immunoassays well known in the art.

[0209] As discussed above, single nucleotide polymorphisms (SNPs) occur frequently in eukaryotic genomes, and the sequence determined from one individual of a species may differ from other allelic forms present within the population. Thus, polypeptides of the present invention are also inclusive of those encoded by an allelic variant of a nucleic acid molecule encoding a ESP. In this embodiment, it is preferred that the polypeptide be encoded by an allelic variant of a gene that encodes a polypeptide having the amino acid sequence selected from the group consisting of SEQ ID NO: 473-666. More preferred is that the polypeptide be encoded by an allelic variant of a gene that has the nucleic acid sequence selected from the group consisting of SEQ ID NO: 1-472.

[0210] Polypeptides of the present invention are also inclusive of derivative polypeptides encoded by a nucleic acid molecule according to the instant invention. In this embodiment, it is preferred that the polypeptide be a ESP. Also preferred are derivative polypeptides having an amino acid sequence selected from the group consisting of SEQ ID NO: 473-666 and which has been acetylated, carboxylated, phosphorylated, glycosylated, ubiquitinated or other PTMs. In another preferred embodiment, the derivative has been labeled with, e.g., radioactive isotopes such as ¹²⁵I, ³²P, ³⁵S, and ³H. In another preferred embodiment, the derivative has been labeled with fluorophores, chemiluminescent agents, enzymes, and antiligands that can serve as specific binding pair members for a labeled ligand.

[0211] Polypeptide modifications are well known to those of skill and have been described in great detail in the scientific literature. Several particularly common modifications, glycosylation, lipid attachment, sulfation, gamma-carboxylation of glutamic acid residues, hydroxylation and ADP-ribosylation, for instance, are described in most basic texts, such as, for instance Creighton, Protein Structure and Molecular Properties, 2nd ed., W. H. Freeman and Company (1993). Many detailed reviews are available on this subject, such as, for example, those provided by Wold, in Johnson (ed.), Posttranslational Covalent Modification of Proteins, pgs. 1-12, Academic Press (1983); Seifter et al., Meth. Enzymol. 182: 626-646 (1990) and Rattan et al., Ann. N.Y. Acad. Sci. 663: 48-62 (1992).

[0212] One may determine whether a polypeptide of the invention is likely to be post-translationally modified by analyzing the sequence of the polypeptide to determine if there are peptide motifs indicative of sites for post-translational modification. There are a number of computer programs that permit prediction of post-translational modifications. See, e.g., www.expasy.org (accessed Nov. 11, 2002), which includes PSORT, for prediction of protein sorting signals and localization sites, SignalP, for prediction of signal peptide cleavage sites, MITOPROT and Predotar, for prediction of mitochondrial targeting sequences, NetOGlyc, for prediction of type O-glycosylation sites in mammalian proteins, big-PI Predictor and DGPI, for prediction of prenylation-anchor and cleavage sites, and NetPhos, for prediction of Ser, Thr and Tyr phosphorylation sites in eukaryotic proteins. Other computer programs, such as those included in GCG, also may be used to determine post-translational modification peptide motifs.

[0213] General examples of types of post-translational modifications include, but are not limited to: (Z)-dehydrobutyrine; 1-chondroitin sulfate-L-aspartic acid ester; 1′-glycosyl-L-tryptophan; 1′-phospho-L-histidine; 1-thioglycine; 2′-(S-L-cysteinyl)-L-histidine; 2′-[3-carboxamido(trimethylammonio)propyl]-L-histidine; 2′-alpha-mannosyl-L-tryptophan; 2-methyl-L-glutamine; 2-oxobutanoic acid; 2-pyrrolidone carboxylic acid; 3′-(1′-L-histidyl)-L-tyrosine; 3′-(8alpha-FAD)-L-histidine; 3′-(S-L-cysteinyl)-L-tyrosine; 3′, 3″,5′-triiodo-L-thyronine; 3′-4′-phospho-L-tyrosine; 3-hydroxy-L-proline; 3′-methyl-L-histidine; 3-methyl-L-lanthionine; 3′-phospho-L-histidine; 4′-(L-tryptophan)-L-tryptophyl quinone; 42 N-cysteinyl-glycosylphosphatidylinositolethanolamine; 43-(T-L-histidyl)-L-tyrosine; 4-hydroxy-L-arginine; 4-hydroxy-L-lysine; 4-hydroxy-L-proline; 5′-(N-6-L-lysine)-L-topaquinone; 5-hydroxy-L-lysine; 5-methyl-L-arginine; alpha-1-microglobulin-Ig alpha complex chromophore; bis-L-cysteinyl bis-L-histidino diiron disulfide; bis-L—cysteinyl-L-N3′-histidino-L-serinyl tetrairon' tetrasulfide; chondroitin sulfate D-glucuronyl-D-galactosyl-D-galactosyl-D-xylosyl-L-serine; D-alanine; D-allo-isoleucine; D-asparagine; dehydroalanine; dehydrotyrosine; dermatan 4-sulfate D-glucuronyl-D-galactosyl-D-galactosyl-D-xylosyl-L-serine; D-glucuronyl-N-glycine; dipyrrolylmethanemethyl-L-cysteine; D-leucine; D-methionine; D-phenylalanine; D-serine; D-tryptophan; glycine amide; glycine oxazolecarboxylic acid; glycine thiazolecarboxylic acid; heme P450-bis-L-cysteine-L-tyrosine; heme-bis-L-cysteine; hemediol-L-aspartyl ester-L-glutamyl ester; hemediol-L-aspartyl ester-L-glutamyl ester-L-methionine sulfonium; heme-L-cysteine; heme-L-histidine; heparan sulfate D-glucuronyl-D-galactosyl-D-galactosyl-D-xylosyl-L-serine; heme P450-bis-L-cysteine-L-lysine; hexakis-L-cysteinyl hexairon hexasulfide; keratan sulfate D-glucuronyl-D-galactosyl-D-galactosyl-D-xylosyl-L-threonine; L oxoalanine-lactic acid; L phenyllactic acid; 1′-(8alpha-FAD)-L-histidine; L-2′.4′,5′-topaquinone; L-3′,4′-dihydroxyphenylalanine; L-3′.4′.5′-trihydroxyphenylalanine; L-4′-bromophenylalanine; L-6′-bromotryptophan; L-alanine amide; L-alanyl imidazolinone glycine; L-allysine; L-arginine amide; L-asparagine amide; L-aspartic 4-phosphoric anhydride; L-aspartic acid 1-amide; L-beta-methylthioaspartic acid; L-bromohistidine; L-citrulline; L-cysteine amide; L-cysteine glutathione disulfide; L-cysteine methyl disulfide; L-cysteine methyl ester; L-cysteine oxazolecarboxylic acid; L-cysteine oxazolinecarboxylic acid; L-cysteine persulfide; L-cysteine sulfenic acid; L-cysteine sulfinic acid; L-cysteine thiazolecarboxylic acid; L-cysteinyl homocitryl molybdenum-heptairon-nonasulfide; L-cysteinyl imidazolinone glycine; L-cysteinyl molybdopterin; L-cysteinyl molybdopterin guanine dinucleotide; L-cystine; L-erythro-beta-hydroxyasparagine; L-erythro-beta-hydroxyaspartic acid; L-gamma-carboxyglutamic acid; L-glutamic acid 1-amide; L-glutamic acid 5-methyl ester; L-glutamine amide; L-glutamyl 5-glycerylphosphorylethanolamine; L-histidine amide; L-isoglutamyl-polyglutamic acid; L-isoglutamyl-polyglycine; L-isoleucine amide; L-lanthionine; L-leucine amide; L-lysine amide; L-lysine thiazolecarboxylic acid; L-lysinoalanine; L-methionine amide; L-methionine sulfone; L-phenyalanine thiazolecarboxylic acid; L-phenylalanine amide; L-proline amide; L-selenocysteine; L-selenocysteinyl molybdopterin guanine dinucleotide; L-serine amide; L-serine thiazolecarboxylic acid; L-seryl imidazolinone glycine; L-T-bromophenylalanine; L-T-bromophenylalanine; L-threonine amide; L-thyroxine; L-tryptophan amide; L-tryptophyl quinone; L-tyrosine amide; L-valine amide; meso-lanthionine; N-(L-glutamyl)-L-tyrosine; N-(L-isoaspartyl)-glycine; N-(L-isoaspartyl)-L-cysteine; N,N,N-trimethyl-L-alanine; N,N-dimethyl-L-proline; N2-acetyl-L-lysine; N2-succinyl-L-tryptophan; N4-(ADP-ribosyl)-L-asparagine; N4-glycosyl-L-asparagine; N4-hydroxymethyl-L-asparagine; N4-methyl-L-asparagine; N5-methyl-L-glutamine; N6-1-carboxyethyl-L-lysine; N6-(4-amino hydroxybutyl)-L-lysine; N6-(L-isoglutamyl)-L-lysine; N6-(phospho-5′-adenosine)-L-lysine; N6-(phospho-5′-guanosine)-L-tysine; N6,N6,N6-trimethyl-L-lysine; N6,N6-dimethyl-L-lysine; N6-acetyl-L-lysine; N6-biotinyl-L-lysine; N6-carboxy-L-lysine; N6-formyl-L-lysine; N6-glycyl-L-lysine; N6-lipoyl-L-lysine; N6-methyl-L-lysine; N6-methyl-N-6-poly(N-methyl-propylamine)-L-lysine; N6-mureinyl-L-lysine; N6-myristoyl-L-lysine; N6-palmitoyl-L-lysine; N6-pyridoxal phosphate-L-lysine; N6-pyruvic acid 2-iminyl-L-lysine; N6-retinal-L-lysine; N-acetylglycine; N-acetyl-L-glutamine; N-acetyl-L-alanine; N-acetyl-L-aspartic acid; N-acetyl-L-cysteine; N-acetyl-L-glutamic acid; N-acetyl-L-isoleucine; N-acetyl-L-methionine; N-acetyl-L-proline; N-acetyl-L-serine; N-acetyl-L-threonine; N-acetyl-L-tyrosine; N-acetyl-L-valine; N-alanyl-glycosylphosphatidylinositolethanolamine; N-asparaginyl-glycosylphosphatidylinositolethanolamine; N-aspartyl-glycosylphosphatidylinositolethanolamine; N-formylglycine; N-formyl-L-methionine; N-glycyl-glycosylphosphatidylinositolethanolamine; N-L-glutamyl-poly-L-glutamic acid; N-methylglycine; N-methyl-L-alanine; N-methyl-L-methionine; N-methyl-L-phenylalanine; N-myristoyl-glycine; N-palmitoyl-L-cysteine; N-pyruvic acid 2-iminyl-L-cysteine; N-pyruvic acid 2-iminyl-L-valine; N-seryl-glycosylphosphatidylinositolethanolamine; N-seryl-glycosyESPhingolipidinositolethanolamine; O-(ADP-ribosyl)-L-serine; O-(phospho-5′-adenosine)-L-threonine; O-(phospho-5′-DNA)-L-serine; O-(phospho-5′-DNA)-L-threonine; O-(phospho-5′rRNA)-L-serine; O-(phosphoribosyl dephospho-coenzyme A)-L-serine; O-(sn-1-glycerophosphoryl)-L-serine; O4′-(8alpha-FAD)-L-tyrosine; O4′-(phospho-5′-adenosine)-L-tyrosine; O4′-(phospho-5′-DNA)-L-tyrosine; O4′-(phospho-5′-RNA)-L-tyrosine; O4′-(phospho-5′-uridine)-L-tyrosine; O4-glycosyl-L-hydroxyproline; O4′-glycosyl-L-tyrosine; O4′-sulfo-L-tyrosine; O5-glycosyl-L-hydroxylysine; O-glycosyl-L-serine; O-glycosyl-L-threonine; omega-N-(ADP-ribosyl)-L-arginine; omega-N-omega-N′-dimethyl-L-arginine; omega-N-methyl-L-arginine; omega-N-omega-N-dimethyl-L-arginine; omega-N-phospho-L-arginine; O'octanoyl-L-serine; O-palmitoyl-L-serine; O-palmitoyl-L-threonine; O-phospho-L-serine; O-phospho-L-threonine; O-phosphopantetheine-L-serine; phycoerythrobilin-bis-L-cysteine; phycourobilin-bis-L-cysteine; pyrroloquinoline quinone; pyruvic acid; S hydroxycinnamyl-L-cysteine; S-(2-aminovinyl)methyl-D-eysteine; S-(2-aminovinyl)-D-cysteine; S-(6-FW-L-cysteine; S-(8alpha-FAD)-L-cysteine; S-(ADP-ribosyl)-L-cysteine; S-(L-isoglutamyl)-L-cysteine; S-12-hydroxyfarnesyl-L-cysteine; S-acetyl-L-cysteine; S-diacylglycerol-L-cysteine; S-diphytanylglycerot diether-L-cysteine; S-farnesyl-L-cysteine; S-geranylgeranyl-L-cysteine; S-glycosyl-L-cysteine; S-glycyl-L-cysteine; S-methyl-L-cysteine; S-nitrosyl-L-cysteine; S-palmitoyl-L-cysteine; S-phospho-L-cysteine; S-phycobiliviolin-L-cysteine; S-phycocyanobilin-L-cysteine; S-phycoerythrobilin-L-cysteine; S-phytochromobilin-L-cysteine; S-selenyl-L-cysteine; S-sulfo-L-cysteine; tetrakis-L-cysteinyl diiron disulfide; tetrakis-L-cysteinyl iron; tetrakis-L-cysteinyl tetrairon tetrasulfide; trans-2,3-cis 4-dihydroxy-L-proline; tris-L-cysteinyl triiron tetrasulfide; tris-L-cysteinyl triiron trisulfide; tris-L-cysteinyl-L-aspartato tetrairon tetrasulfide; tris-L-cysteinyl-L-cysteine persulfido-bis-L-glutamato-L-histidino tetrairon disulfide trioxide; tris-L-cysteinyl-L-N3′-histidino tetrairon tetrasulfide; tris-L-cysteinyl-L-N1′-histidino tetrairon tetrasulfide; and tris-L-cysteinyl-L-serinyl tetrairon tetrasulfide.

[0214] Additional examples of PTMs may be found in web sites such as the Delta Mass database based on Krishna, R. G. and F. Wold (1998). Posttranslational Modifications. Proteins—Analysis and Design. R. H. Angeletti. San Diego, Academic Press. 1: 121-206. Methods in Enzymology, 193, J. A. McClosky (ed) (1990), pages 647-660; Methods in Protein Sequence Analysis edited by Kazutomo Imahori and Fumio Sakiyama, Plenum Press, (1993) “Post-translational modifications of proteins” R. G. Krishna and F. Wold pages 167-172; “GlycoSuiteDB: a new curated relational database of glycoprotein glycan structures and their biological sources” Cooper et al. Nucleic Acids Res. 29; 332-335 (2001) “O-GLYCBASE version 4.0: a revised database of O-glycosylated proteins” Gupta et al. Nucleic Acids Research, 27: 370-372 (1999); and “PhosphoBase, a database of phosphorylation sites: release 2.0.”, Kreegipuu et al. Nucleic Acids Res 27(1):237-239 (1999) see also, WO 02/21139A2, the disclosure of which is incorporated herein by reference in its entirety.

[0215] Tumorigenesis is often accompanied by alterations in the post-translational modifications of proteins. Thus, in another embodiment, the invention provides polypeptides from cancerous cells or tissues that have altered post-translational modifications compared to the post-translational modifications of polypeptides from normal cells or tissues. A number of altered post-translational modifications are known. One common alteration is a change in phosphorylation state, wherein the polypeptide from the cancerous cell or tissue is hyperphosphorylated or hypophosphorylated compared to the polypeptide from a normal tissue, or wherein the polypeptide is phosphorylated on different residues than the polypeptide from a normal cell. Another common alteration is a change in glycosylation state, wherein the polypeptide from the cancerous cell or tissue has more or less glycosylation than the polypeptide from a normal tissue, and/or wherein the polypeptide from the cancerous cell or tissue has a different type of glycosylation than the polypeptide from a noncancerous cell or tissue. Changes in glycosylation may be critical because carbohydrate-protein and carbohydrate-carbohydrate interactions are important in cancer cell progression, dissemination and invasion. See, e.g., Barchi, Curr. Pharm. Des. 6: 485-501 (2000), Verma, Cancer Biochem. Biophys. 14: 151-162 (1994) and Dennis et al., Bioessays 5: 412-421 (1999).

[0216] Another post-translational modification that may be altered in cancer cells is prenylation. Prenylation is the covalent attachment of a hydrophobic prenyl group (either farnesyl or geranylgeranyl) to a polypeptide. Prenylation is required for localizing a protein to a cell membrane and is often required for polypeptide function. For instance, the Ras superfamily of GTPase signalling proteins must be prenylated for function in a cell. See, e.g., Prendergast et al., Semin. Cancer Biol. 10: 443-452 (2000) and Khwaja et al., Lancet 355: 741-744 (2000).

[0217] Other post-translation modifications that may be altered in cancer cells include, without limitation, polypeptide methylation, acetylation, arginylation or racemization of amino acid residues. In these cases, the polypeptide from the cancerous cell may exhibit either increased or decreased amounts of the post-translational modification compared to the corresponding polypeptides from noncancerous cells.

[0218] Other polypeptide alterations in cancer cells include abnormal polypeptide cleavage of proteins and aberrant protein-protein interactions. Abnormal polypeptide cleavage may be cleavage of a polypeptide in a cancerous cell that does not usually occur in a normal cell, or a lack of cleavage in a cancerous cell, wherein the polypeptide is cleaved in a normal cell. Aberrant protein-protein interactions may be either covalent cross-linking or non-covalent binding between proteins that do not normally bind to each other. Alternatively, in a cancerous cell, a protein may fail to bind to another protein to which it is bound in a noncancerous cell. Alterations in cleavage or in protein-protein interactions may be due to over- or underproduction of a polypeptide in a cancerous cell compared to that in a normal cell, or may be due to alterations in post-translational modifications (see above) of one or more proteins in the cancerous cell. See, e.g., Henschen-Edman, Ann. N.Y. Acad. Sci. 936: 580-593 (2001).

[0219] Alterations in polypeptide post-translational modifications, as well as changes in polypeptide cleavage and protein-protein interactions, may be determined by any method known in the art. For instance, alterations in phosphorylation may be determined by using anti-phosphoserine, anti-phosphothreonine or anti-phosphotyrosine antibodies or by amino acid analysis. Glycosylation alterations may be determined using antibodies specific for different sugar residues, by carbohydrate sequencing, or by alterations in the size of the glycoprotein, which can be determined by, e.g., SDS polyacrylamide gel electrophoresis (PAGE). Other alterations of post-translational modifications, such as prenylation, racemization, methylation, acetylation and arginylation, may be determined by chemical analysis, protein sequencing, amino acid analysis, or by using antibodies specific for the particular post-translational modifications. Changes in protein-protein interactions and in polypeptide cleavage may be analyzed by any method known in the art including, without limitation, non-denaturing PAGE (for non-covalent protein-protein interactions), SDS PAGE (for covalent protein-protein interactions and protein cleavage), chemical cleavage, protein sequencing or immunoassays.

[0220] In another embodiment, the invention provides polypeptides that have been post-translationally modified. In one embodiment, polypeptides may be modified enzymatically or chemically, by addition or removal of a post-translational modification. For example, a polypeptide may be glycosylated or deglycosylated enzymatically. Similarly, polypeptides may be phosphorylated using a purified kinase, such as a MAP kinase (e.g, p38, ERK, or JNK) or a tyrosine kinase (e.g., Src or erbB2). A polypeptide may also be modified through synthetic chemistry. Alternatively, one may isolate the polypeptide of interest from a cell or tissue that expresses the polypeptide with the desired post-translational modification. In another embodiment, a nucleic acid molecule encoding the polypeptide of interest is introduced into a host cell that is capable of post-translationally modifying the encoded polypeptide in the desired fashion. If the polypeptide does not contain a motif for a desired post-translational modification, one may alter the post-translational modification by mutating the nucleic acid sequence of a nucleic acid molecule encoding the polypeptide so that it contains a site for the desired post-translational modification. Amino acid sequences that may be post-translationally modified are known in the art. See, e.g., the programs described above on the website www.expasy.org. The nucleic acid molecule may also be introduced into a host cell that is capable of post-translationally modifying the encoded polypeptide. Similarly, one may delete sites that are post-translationally modified by either mutating the nucleic acid sequence so that the encoded polypeptide does not contain the post-translational modification motif, or by introducing the native nucleic acid molecule into a host cell that is not capable of post-translationally modifying the encoded polypeptide.

[0221] It will be appreciated, as is well known and as noted above, that polypeptides are not always entirely linear. For instance, polypeptides may be branched as a result of ubiquitination, and they may be circular, with or without branching, generally as a result of posttranslation events, including natural processing event and events brought about by human manipulation which do not occur naturally. Circular, branched and branched circular polypeptides may be synthesized by non-translation natural process and by entirely synthetic methods, as well. Modifications can occur anywhere in a polypeptide, including the peptide backbone, the amino acid side-chains and the amino or carboxyl termini. In fact, blockage of the amino or carboxyl group in a polypeptide, or both, by a covalent modification, is common in naturally occurring and synthetic polypeptides and such modifications may be present in polypeptides of the present invention, as well. For instance, the amino terminal residue of polypeptides made in E. coli, prior to proteolytic processing, almost invariably will be N-formylmethionine.

[0222] Useful post-synthetic (and post-translational) modifications include conjugation to detectable labels, such as fluorophores. A wide variety of amine-reactive and thiol-reactive fluorophore derivatives have been synthesized that react under nondenaturing conditions with N-terminal amino groups and epsilon amino groups of lysine residues, on the one hand, and with free thiol groups of cysteine residues, on the other.

[0223] Kits are available commercially that permit conjugation of proteins to a variety of amine-reactive or thiol-reactive fluorophores: Molecular Probes, Inc. (Eugene, Oreg., USA), e.g., offers kits for conjugating proteins to Alexa Fluor 350, Alexa Fluor 430, Fluorescein-EX, Alexa Fluor 488, Oregon Green 488, Alexa Fluor 532, Alexa Fluor 546, Alexa Fluor 546, Alexa Fluor 568, Alexa Fluor 594, and Texas Red-X.

[0224] A wide variety of other amine-reactive and thiol-reactive fluorophores are available commercially (Molecular Probes, Inc., Eugene, Oreg., USA), including Alexa Fluor® 350, Alexa Fluor® 488, Alexa Fluor® 532, Alexa Fluor® 546, Alexa Fluor® 568, Alexa Fluor® 594, Alexa Fluor® 647 (monoclonal antibody labeling kits available from Molecular Probes, Inc., Eugene, Oreg., USA), BODIPY dyes, such as BODIPY 493/503, BODIPY FL, BODIPY R6G, BODIPY 530/550, BODIPY TMR, BODIPY 558/568, BODIPY 558/568, BODIPY 564/570, BODIPY 576/589, BODIPY 581/591, BODIPY TR, BODIPY 630/650, BODIPY 650/665, Cascade Blue, Cascade Yellow, Dansyl, lissamine rhodamine B, Marina Blue, Oregon Green 488, Oregon Green 514, Pacific Blue, rhodamine 6G, rhodamine green, rhodamine red, tetramethylrhodamine, Texas Red (available from Molecular Probes, Inc., Eugene, Oreg., USA).

[0225] The polypeptides of the present invention can also be conjugated to fluorophores, other proteins, and other macromolecules, using bifunctional linking reagents. Common homobifunctional reagents include, e.g., APG, AEDP, BASED, BMB, BMDB, BMH, BMOE, BM[PEO]3, BM[PEO]4, BS3, BSOCOES, DFDNB, DMA, DMP, DMS, DPDPB, DSG, DSP (Lomant's Reagent), DSS, DST, DTBP, DTME, DTSSP, EGS, HBVS, Sulfo-BSOCOES, Sulfo-DST, Sulfo-EGS (all available from Pierce, Rockford, Ill., USA); common heterobifunctional cross-linkers include ABH, AMAS, ANB-NOS, APDP, ASBA, BMPA, BMPH, BMPS, EDC, EMCA, EMCH, EMCS, KMUA, KMUH, GMBS, LC-SMCC, LC-SPDP, MBS, M2C2H, MPBH, MSA, NHS-ASA, PDPH, PMPI, SADP, SAED, SAND, SANPAH, SASD, SATP, SBAP, SFAD, SIA, SIAB, SMCC, SMPB, SMPH, SMPT, SPDP, Sulfo-EMCS, Sulfo-GMBS, Sulfo-HSAB, Sulfo-KMUS, Sulfo-LC-SPDP, Sulfo-MBS, Sulfo-NHS-LC-ASA, Sulfo-SADP, Sulfo-SANPAH, Sulfo-SIAB, Sulfo-SMCC, Sulfo-SMPB, Sulfo-LC-SMPT, SVSB, TFCS (all available Pierce, Rockford, Ill., USA).

[0226] Polypeptides of the present invention, including full length polypeptides, fragments and fusion proteins, can be conjugated, using such cross-linking reagents, to fluorophores that are not amine- or thiol-reactive. Other labels that usefully can be conjugated to polypeptides of the present invention include radioactive labels, echosonographic contrast reagents, and MRI contrast agents.

[0227] Polypeptides of the present invention, including full length polypeptide, fragments and fusion proteins, can also usefully be conjugated using cross-linking agents to carrier proteins, such as KLH, bovine thyroglobulin, and even bovine serum albumin (BSA), to increase immunogenicity for raising anti-ESP antibodies.

[0228] Polypeptides of the present invention, including full length polypeptide, fragments and fusion proteins, can also usefully be conjugated to polyethylene glycol (PEG); PEGylation increases the serum half life of proteins administered intravenously for replacement therapy. Delgado et al., Crit. Rev. Ther. Drug Carrier Syst. 9(34): 249-304 (1992); Scott et al., Curr. Pharm. Des. 4(6): 423-38 (1998); DeSantis et al., Curr. Opin. Biotechnol. 10(4): 324-30 (1999). PEG monomers can be attached to the protein directly or through a linker, with PEGylation using PEG monomers activated with tresyl chloride (2,2,2-trifluoroethanesulphonyl chloride) permitting direct attachment under mild conditions.

[0229] Polypeptides of the present invention are also inclusive of analogs of a polypeptide encoded by a nucleic acid molecule according to the instant invention. In a preferred embodiment, this polypeptide is a ESP. In a more preferred embodiment, this polypeptide is derived from a polypeptide having part or all of the amino acid sequence of SEQ ID NO: 473-666. Also preferred is an analog polypeptide comprising one or more substitutions of non-natural amino acids or non-native inter-residue bonds compared to the naturally occurring polypeptide. In one embodiment, the analog is structurally similar to a ESP, but one or more peptide linkages is replaced by a linkage selected from the group consisting of —CH₂NH—, —CH₂S—, —CH₂—CH₂—, —CH═CH—(cis and trans), —COCH₂—, —CH(OH)CH₂—and —CH₂SO—. In another embodiment, the analog comprises substitution of one or more amino acids of a ESP with a D-amino acid of the same type or other non-natural amino acid in order to generate more stable peptides. D-amino acids can readily be incorporated during chemical peptide synthesis: peptides assembled from D-amino acids are more resistant to proteolytic attack; incorporation of D-amino acids can also be used to confer specific three-dimensional conformations on the peptide. Other amino acid analogues commonly added during chemical synthesis include ornithine, norleucine, phosphorylated amino acids (typically phosphoserine, phosphothreonine, phosphotyrosine), L-malonyltyrosine, a non-hydrolyzable analog of phosphotyrosine (see, e.g., Kole et al., Biochem. Biophys. Res. Com. 209: 817-821 (1995)), and various halogenated phenylalanine derivatives.

[0230] Non-natural amino acids can be incorporated during solid phase chemical synthesis or by recombinant techniques, although the former is typically more common. Solid phase chemical synthesis of peptides is well established in the art. Procedures are described, inter alia, in Chan et al. (eds.), Fmoc Solid Phase Peptide Synthesis: A Practical Approach (Practical Approach Series), Oxford Univ. Press (March 2000); Jones, Amino Acid and Peptide Synthesis (Oxford Chemistry Primers, No 7), Oxford Univ. Press (1992); and Bodanszky, Principles of Peptide Synthesis (Springer Laboratory), Springer Verlag (1993).

[0231] Amino acid analogues having detectable labels are also usefully incorporated during synthesis to provide derivatives and analogs. Biotin, for example can be added using biotinoyl-(9-fluorenylmethoxycarbonyl)-L-lysine (FMOC biocytin) (Molecular Probes, Eugene, Oreg., USA). Biotin can also be added enzymatically by incorporation into a fusion protein of a E. coli BirA substrate peptide. The FMOC and tBOC derivatives of dabcyl-L-lysine (Molecular Probes, Inc., Eugene, Oreg., USA) can be used to incorporate the dabcyl chromophore at selected sites in the peptide sequence during synthesis. The aminonaphthalene derivative EDANS, the most common fluorophore for pairing with the dabcyl quencher in fluorescence resonance energy transfer (FRET) systems, can be introduced during automated synthesis of peptides by using EDANS-FMOC-L-glutamic acid or the corresponding tBOC derivative (both from Molecular Probes, Inc., Eugene, Oreg., USA). Tetramethylrhodamine fluorophores can be incorporated during automated FMOC synthesis of peptides using (FMOC)-TMR-L-lysine (Molecular Probes, Inc. Eugene, Oreg., USA).

[0232] Other useful amino acid analogues that can be incorporated during chemical synthesis include aspartic acid, glutamic acid, lysine, and tyrosine analogues having allyl side-chain protection (Applied Biosystems, Inc., Foster City, Calif., USA); the allyl side chain permits synthesis of cyclic, branched-chain, sulfonated, glycosylated, and phosphorylated peptides.

[0233] A large number of other FMOC-protected non-natural amino acid analogues capable of incorporation during chemical synthesis are available commercially, including, e.g., Fmoc-2-aminobicyclo[2.2. I]heptane-2-carboxylic acid, Fmoc-3-endo-aminobicyclo[2.2.1]heptane-2-endo-carboxylic acid, Fmoc-3-exo-aminobicyclo[2.2.1]heptane-2-exo-carboxylic acid, Fmoc-3-endo-aminobicyclo[2.2.1]hept-5-ene-2-endo-carboxylic acid, Fmoc-3-exo-amino-bicyclo[2.2.1]hept-5-ene-2-exo-carboxylic acid, Fmoc-cis-2-amino-1-cyclohexanecarboxylic acid, Fmoc-trans-2-amino-1-cyclohexanecarboxylic acid, Fmoc-1-amino-1-cyclopentanecarboxylic acid, Fmoc-cis-2-amino-1-cyclopentanecarboxylic acid, Fmoc-1-amino-1-cyclopropanecarboxylic acid, Fmoc-D-2-amino-4-(ethylthio)butyric acid, Fmoc-L-2-amino-4-(ethylthio)butyric acid, Fmoc-L-buthionine, Fmoc-S-methyl-L-Cysteine, Fmoc-2-aminobenzoic acid (anthranillic acid), Fmoc-3-aminobenzoic acid, Fmoc-4-aminobenzoic acid, Fmoc-2-aminobenzophenone-2′-carboxylic acid, Fmoc-N-(4-aminobenzoyl)-β-alanine, Fmoc-2-amino-4,5-dimethoxybenzoic acid, Fmoc-4-aminohippuric acid, Fmoc-2-amino-3-hydroxybenzoic acid, Fmoc-2-amino-5-hydroxybenzoic acid, Fmoc-3-amino-4-hydroxybenzoic acid, Fmoc-4-amino-3-hydroxybenzoic acid, Fmoc-4-amino-2-hydroxybenzoic acid, Fmoc-5-amino-2-hydroxybenzoic acid, Fmoc-2-amino-3-methoxybenzoic acid, Fmoc-4-amino-3-methoxybenzoic acid, Fmoc-2-amino-3-methylbenzoic acid, Fmoc-2-amino-5-methylbenzoic acid, Fmoc-2-amino-6-methylbenzoic acid, Fmoc-3-amino-2-methylbenzoic acid, Fmoc-3-amino-4-methylbenzoic acid, Fmoc-4-amino-3-methylbenzoic acid, Fmoc-3-amino-2-naphtoic acid, Fmoc-D,L-3-amino-3-phenylpropionic acid, Fmoc-L-Methyldopa, Fmoc-2-amino-4,6-dimethyl-3-pyridinecarboxylic acid, Fmoc-D,L-amino-2-thiophenacetic acid, Fmoc-4-(carboxymethyl)piperazine, Fmoc-4-carboxypiperazine, Fmoc-4-(carboxymethyl)homopiperazine, Fmoc-4-phenyl-4-piperidinecarboxylic acid, Fmoc-L-1,2,3,4-tetrahydronorharman-3-carboxylic acid, Fmoc-L-thiazolidine-4-carboxylic acid, all available from The Peptide Laboratory (Richmond, Calif., USA).

[0234] Non-natural residues can also be added biosynthetically by engineering a suppressor tRNA, typically one that recognizes the UAG stop codon, by chemical aminoacylation with the desired unnatural amino acid. Conventional site-directed mutagenesis is used to introduce the chosen stop codon UAG at the site of interest in the protein gene. When the acylated suppressor tRNA and the mutant gene are combined in an in vitro transcription/translation system, the unnatural amino acid is incorporated in response to the UAG codon to give a protein containing that amino acid at the specified position. Liu et al., Proc. Natl. Acad. Sci. USA 96(9): 4780-5 (1999); Wang et al., Science 292(5516): 498-500 (2001).

[0235] Fusion Proteins

[0236] Another aspect of the present invention relates to the fusion of a polypeptide of the present invention to heterologous polypeptides. In a preferred embodiment, the polypeptide of the present invention is a ESP. In a more preferred embodiment, the polypeptide of the present invention that is fused to a heterologous polypeptide comprises part or all of the amino acid sequence of SEQ ID NO: 473-666, or is a mutein, homologous polypeptide, analog or derivative thereof. In an even more preferred embodiment, the fusion protein is encoded by a nucleic acid molecule comprising all or part of the nucleic acid sequence of SEQ ID NO: 1-472, or comprises all or part of a nucleic acid sequence that selectively hybridizes or is homologous to a nucleic acid molecule comprising a nucleic acid sequence of SEQ ID NO: 1-472.

[0237] The fusion proteins of the present invention will include at least one fragment of a polypeptide of the present invention, which fragment is at least 6, typically at least 8, often at least 15, and usefully at least 16, 17, 18, 19, or 20 amino acids long. The fragment of the polypeptide of the present to be included in the fusion can usefully be at least 25 amino acids long, at least 50 amino acids long, and can be at least 75, 100, or even 150 amino acids long. Fusions that include the entirety of a polypeptide of the present invention have particular utility.

[0238] The heterologous polypeptide included within the fusion protein of the present invention is at least 6 amino acids in length, often at least 8 amino acids in length, and preferably at least 15, 20, or 25 amino acids in length. Fusions that include larger polypeptides, such as the IgG Fc region, and even entire proteins (such as GFP chromophore-containing proteins) are particularly useful.

[0239] As described above in the description of vectors and expression vectors of the present invention, which discussion is incorporated here by reference in its entirety, heterologous polypeptides to be included in the fusion proteins of the present invention can usefully include those designed to facilitate purification and/or visualization of recombinantly-expressed proteins. See, e.g., Ausubel, Chapter 16, (1992), supra. Although purification tags can also be incorporated into fusions that are chemically synthesized, chemical synthesis typically provides sufficient purity that further purification by HPLC suffices; however, visualization tags as above described retain their utility even when the protein is produced by chemical synthesis, and when so included render the fusion proteins of the present invention useful as directly detectable markers of the presence of a polypeptide of the invention.

[0240] As also discussed above, heterologous polypeptides to be included in the fusion proteins of the present invention can usefully include those that facilitate secretion of recombinantly expressed proteins into the periplasmic space or extracellular milieu for prokaryotic hosts or into the culture medium for eukaryotic cells through incorporation of secretion signals and/or leader sequences. For example, a His⁶ tagged protein can be purified on a Ni affinity column and a GST fusion protein can be purified on a glutathione affinity column. Similarly, a fusion protein comprising the Fc domain of IgG can be purified on a Protein A or Protein G column and a fusion protein comprising an epitope tag such as myc can be purified using an immunoaffinity column containing an anti-c-myc antibody. It is preferable that the epitope tag be separated from the protein encoded by the essential gene by an enzymatic cleavage site that can be cleaved after purification. See also the discussion of nucleic acid molecules encoding fusion proteins that may be expressed on the surface of a cell.

[0241] Other useful fusion proteins of the present invention include those that permit use of the polypeptide of the present invention as bait in a yeast two-hybrid system. See Bartel et al. (eds.), The Yeast Two-Hybrid System, Oxford University Press (1997); Zhu et al., Yeast Hybrid Technologies, Eaton Publishing (2000); Fields et al., Trends Genet. 10(8): 286-92 (1994); Mendelsohn et al., Curr. Opin. Biotechnol. 5(5): 482-6 (1994); Luban et al., Curr. Opin. Biotechnol. 6(1): 59-64 (1995); Allen et al., Trends Biochem. Sci. 20(12): 511-6 (1995); Drees, Curr. Opin. Chem. Biol. 3(1): 64-70 (1999); Topcu et al., Pharm. Res. 17(9): 1049-55 (2000); Fashena et al., Gene 250(1-2): 1-14 (2000); Colas et al., Nature 380, 548-550 (1996); Norman, T. et al., Science 285, 591-595 (1999); Fabbrizio et al., Oncogene 18, 4357-4363 (1999); Xu et al., Proc Natl Acad Sci USA. 94, 12473-12478 (1997); Yang, et al., Nuc. Acids Res. 23, 1152-1156 (1995); Kolonin et al., Proc Natl Acad Sci USA 95, 14266-14271 (1998); Cohen et al., Proc Natl Acad Sci USA 95, 14272-14277 (1998); Uetz, et al. Nature 403, 623-627(2000); Ito, et al., Proc Natl Acad Sci USA 98, 4569-4574(2001). Typically, such fusion is to either E. coli LexA or yeast GAL4 DNA binding domains. Related bait plasmids are available that express the bait fused to a nuclear localization signal.

[0242] Other useful fusion proteins include those that permit display of the encoded polypeptide on the surface of a phage or cell, fusions to intrinsically fluorescent proteins, such as green fluorescent protein (GFP), and fusions to the IgG Fc region, as described above.

[0243] The polypeptides of the present invention can also usefully be fused to protein toxins, such as Pseudomonas exotoxin A, diphtheria toxin, shiga toxin A, anthrax toxin lethal factor, ricin, in order to effect ablation of cells that bind or take up the proteins of the present invention.

[0244] Fusion partners include, inter alia, myc, hemagglutinin (HA), GST, immunoglobulins, β-galactosidase, biotin trpE, protein A, β-lactamase, α-amylase, maltose binding protein, alcohol dehydrogenase, polyhistidine (for example, six histidine at the amino and/or carboxyl terminus of the polypeptide), lacZ, green fluorescent protein (GFP), yeast α mating factor, GAL4 transcription activation or DNA binding domain, luciferase, and serum proteins such as ovalbumin, albumin and the constant domain of IgG. See, e.g., Ausubel (1992), supra and Ausubel (1999), supra. Fusion proteins may also contain sites for specific enzymatic cleavage, such as a site that is recognized by enzymes such as Factor XIII, trypsin, pepsin, or any other enzyme known in the art. Fusion proteins will typically be made by either recombinant nucleic acid methods, as described above, chemically synthesized using techniques well known in the art (e.g., a Merrifield synthesis), or produced by chemical cross-linking.

[0245] Another advantage of fusion proteins is that the epitope tag can be used to bind the fusion protein to a plate or column through an affinity linkage for screening binding proteins or other molecules that bind to the ESP.

[0246] As further described below, the polypeptides of the present invention can readily be used as specific immunogens to raise antibodies that specifically recognize polypeptides of the present invention including ESPs and their allelic variants and homologues. The antibodies, in turn, can be used, inter alia, specifically to assay for the polypeptides of the present invention, particularly ESPs, e.g. by ELISA for detection of protein fluid samples, such as serum, by immunohistochemistry or laser scanning cytometry, for detection of protein in tissue samples, or by flow cytometry, for detection of intracellular protein in cell suspensions, for specific antibody-mediated isolation and/or purification of ESPs, as for example by immunoprecipitation, and for use as specific agonists or antagonists of ESPs.

[0247] One may determine whether polypeptides of the present invention including ESPs, muteins, homologous proteins or allelic variants or fusion proteins of the present invention are functional by methods known in the art. For instance, residues that are tolerant of change while retaining function can be identified by altering the polypeptide at known residues using methods known in the art, such as alanine scanning mutagenesis, Cunningham et al., Science 244(4908): 1081-5 (1989); transposon linker scanning mutagenesis, Chen et al., Gene 263(1-2): 39-48 (2001); combinations of homolog- and alanine-scanning mutagenesis, Jin et al., J. Mol. Biol. 226(3): 851-65 (1992); combinatorial alanine scanning, Weiss et al., Proc. Natl. Acad. Sci USA 97(16): 8950-4 (2000), followed by functional assay. Transposon linker scanning kits are available commercially (New England Biolabs, Beverly, Mass., USA, catalog. no. E7-102S; EZ::TN™ In-Frame Linker Insertion Kit, catalogue no. EZI04KN, (Epicentre Technologies Corporation, Madison, Wis., USA).

[0248] Purification of the polypeptides or fusion proteins of the present invention is well known and within the skill of one having ordinary skill in the art. See, e.g., Scopes, Protein Purification, 2d ed. (1987). Purification of recombinantly expressed polypeptides is described above. Purification of chemically-synthesized peptides can readily be effected, e.g., by HPLC.

[0249] Accordingly, it is an aspect of the present invention to provide the isolated polypeptides or fusion proteins of the present invention in pure or substantially pure form in the presence of absence of a stabilizing agent. Stabilizing agents include both proteinaceous and non-proteinaceous material and are well known in the art. Stabilizing agents, such as albumin and polyethylene glycol (PEG) are known and are commercially available.

[0250] Although high levels of purity are preferred when the isolated polypeptide or fusion protein of the present invention are used as therapeutic agents, such as in vaccines and replacement therapy, the isolated polypeptides of the present invention are also useful at lower purity. For example, partially purified polypeptides of the present invention can be used as immunogens to raise antibodies in laboratory animals.

[0251] In a preferred embodiment, the purified and substantially purified polypeptides of the present invention are in compositions that lack detectable ampholytes, acrylamide monomers, bis-acrylamide monomers, and polyacrylamide.

[0252] The polypeptides or fusion proteins of the present invention can usefully be attached to a substrate. The substrate can be porous or solid, planar or non-planar; the bond can be covalent or noncovalent. For example, the peptides of the invention may be stabilized by covalent linkage to albumin. See, U.S. Pat. No. 5,876,969, the contents of which are hereby incorporated in its entirety.

[0253] For example, the polypeptides or fusion proteins of the present invention can usefully be bound to a porous substrate, commonly a membrane, typically comprising nitrocellulose, polyvinylidene fluoride (PVDF), or cationically derivatized, hydrophilic PVDF; so bound, the polypeptides or fusion proteins of the present invention can be used to detect and quantify antibodies, e.g. in serum, that bind specifically to the immobilized polypeptide or fusion protein of the present invention.

[0254] As another example, the polypeptides or fusion proteins of the present invention can usefully be bound to a substantially nonporous substrate, such as plastic, to detect and quantify antibodies, e.g. in serum, that bind specifically to the immobilized protein of the present invention. Such plastics include polymethylacrylic, polyethylene, polypropylene, polyacrylate, polymethylmethacrylate, polyvinylchloride, polytetrafluoroethylene, polystyrene, polycarbonate, polyacetal, polysulfone, celluloseacetate, cellulosenitrate, nitrocellulose, or mixtures thereof; when the assay is performed in a standard microtiter dish, the plastic is typically polystyrene.

[0255] The polypeptides and fusion proteins of the present invention can also be attached to a substrate suitable for use as a surface enhanced laser desorption ionization source; so attached, the polypeptide or fusion protein of the present invention is useful for binding and then detecting secondary proteins that bind with sufficient affinity or avidity to the surface-bound polypeptide or fusion protein to indicate biologic interaction there between. The polypeptides or fusion proteins of the present invention can also be attached to a substrate suitable for use in surface plasmon resonance detection; so attached, the polypeptide or fusion protein of the present invention is useful for binding and then detecting secondary proteins that bind with sufficient affinity or avidity to the surface-bound polypeptide or fusion protein to indicate biological interaction there between.

Antibodies

[0256] In another aspect, the invention provides antibodies, including fragments and derivatives thereof, that bind specifically to polypeptides encoded by the nucleic acid molecules of the invention. In a preferred embodiment, the antibodies are specific for a polypeptide that is a ESP, or a fragment, mutein, derivative, analog or fusion protein thereof. In a more preferred embodiment, the antibodies are specific for a polypeptide that comprises SEQ ID NO: 473-666, or a fragment, mutein, derivative, analog or fusion protein thereof.

[0257] The antibodies of the present invention can be specific for linear epitopes, discontinuous epitopes, or conformational epitopes of such proteins or protein fragments, either as present on the protein in its native conformation or, in some cases, as present on the proteins as denatured, as, e.g., by solubilization in SDS. New epitopes may be also due to a difference in post translational modifications (PTMs) in disease versus normal tissue. For example, a particular site on a ESP may be glycosylated in cancerous cells, but not glycosylated in normal cells or vis versa. In addition, alternative splice forms of a ESP may be indicative of cancer. Differential degradation of the C or N-terminus of a ESP may also be a marker or target for anticancer therapy. For example, an ESP may be N-terminal degraded in cancer cells exposing new epitopes to which antibodies may selectively bind for diagnostic or therapeutic uses.

[0258] As is well known in the art, the degree to which an antibody can discriminate as among molecular species in a mixture will depend, in part, upon the conformational relatedness of the species in the mixture; typically, the antibodies of the present invention will discriminate over adventitious binding to non-ESP polypeptides by at least two-fold, more typically by at least 5-fold, typically by more than 10-fold, 25-fold, 50-fold, 75-fold, and often by more than 100-fold, and on occasion by more than 500-fold or 1000-fold. When used to detect the proteins or protein fragments of the present invention, the antibody of the present invention is sufficiently specific when it can be used to determine the presence of the polypeptide of the present invention in samples derived from human endometrial.

[0259] Typically, the affinity or avidity of an antibody (or antibody multimer, as in the case of an IgM pentamer) of the present invention for a protein or protein fragment of the present invention will be at least about 1×10⁻⁶ molar (M), typically at least about 5×10⁻⁷ M, 1×10⁻⁷ M, with affinities and avidities of at least 1×10⁻⁸ M, 5×10⁻⁹ M, 1×10⁻¹⁰ M and up to 1×10⁻¹³ M proving especially useful.

[0260] The antibodies of the present invention can be naturally occurring forms, such as IgG, IgM, IgD, IgE, IgY, and IgA, from any avian, reptilian, or mammalian species.

[0261] Human antibodies can, but will infrequently, be drawn directly from human donors or human cells. In such case, antibodies to the polypeptides of the present invention will typically have resulted from fortuitous immunization, such as autoimmune immunization, with the polypeptide of the present invention. Such antibodies will typically, but will not invariably, be polyclonal. In addition, individual polyclonal antibodies may be isolated and cloned to generate monoclonals.

[0262] Human antibodies are more frequently obtained using transgenic animals that express human immunoglobulin genes, which transgenic animals can be affirmatively immunized with the protein immunogen of the present invention. Human Ig-transgenic mice capable of producing human antibodies and methods of producing human antibodies therefrom upon specific immunization are described, inter alia, in U.S. Pat. Nos. 6,162,963; 6,150,584; 6,114,598; 6,075,181; 5,939,598; 5,877,397; 5,874,299; 5,814,318; 5,789,650; 5,770,429; 5,661,016; 5,633,425; 5,625,126; 5,569,825; 5,545,807; 5,545,806, and 5,591,669, the disclosures of which are incorporated herein by reference in their entireties. Such antibodies are typically monoclonal, and are typically produced using techniques developed for production of murine antibodies.

[0263] Human antibodies are particularly useful, and often preferred, when the antibodies of the present invention are to be administered to human beings as in vivo diagnostic or therapeutic agents, since recipient immune response to the administered antibody will often be substantially less than that occasioned by administration of an antibody derived from another species, such as mouse.

[0264] IgG, IgM, IgD, IgE, IgY, and IgA antibodies of the present invention are also usefully obtained from other species, including mammals such as rodents (typically mouse, but also rat, guinea pig, and hamster), lagomorphs (typically rabbits), and also larger mammals, such as sheep, goats, cows, and horses; or egg laying birds or reptiles such as chickens or alligators. In such cases, as with the transgenic human-antibody-producing non-human mammals, fortuitous immunization is not required, and the non-human mammal is typically affirmatively immunized, according to standard immunization protocols, with the polypeptide of the present invention. One form of avian antibodies may be generated using techniques described in WO 00/29444, published 25 May 2000.

[0265] As discussed above, virtually all fragments of 8 or more contiguous amino acids of a polypeptide of the present invention can be used effectively as immunogens when conjugated to a carrier, typically a protein such as bovine thyroglobulin, keyhole limpet hemocyanin, or bovine serum albumin, conveniently using a bifunctional linker such as those described elsewhere above, which discussion is incorporated by reference here.

[0266] Immunogenicity can also be conferred by fusion of the polypeptide of the present invention to other moieties. For example, polypeptides of the present invention can be produced by solid phase synthesis on a branched polylysine core matrix; these multiple antigenic peptides (MAPs) provide high purity, increased avidity, accurate chemical definition and improved safety in vaccine development. Tam et al., Proc. Natl. Acad. Sci. USA 85: 5409-5413 (1988); Posnett et al., J. Biol. Chem. 263: 1719-1725 (1988).

[0267] Protocols for immunizing non-human mammals or avian species are well-established in the art. See Harlow et al. (eds.), Using Antibodies: A Laboratory Manual, Cold Spring Harbor Laboratory (1998); Coligan et al. (eds.), Current Protocols in Immunology, John Wiley & Sons, Inc. (2001); Zola, Monoclonal Antibodies: Preparation and Use of Monoclonal Antibodies and Engineered Antibody Derivatives (Basics: From Background to Bench), Springer Verlag (2000); Gross M, Speck J. Dtsch. Tierarztl. Wochenschr. 103: 417422 (1996). Immunization protocols often include multiple immunizations, either with or without adjuvants such as Freund's complete adjuvant and Freund's incomplete adjuvant, and may include naked DNA immunization (Moss, Semin. Immunol. 2: 317-327 (1990).

[0268] Antibodies from non-human mammals and avian species can be polyclonal or monoclonal, with polyclonal antibodies having certain advantages in immunohistochemical detection of the polypeptides of the present invention and monoclonal antibodies having advantages in identifying and distinguishing particular epitopes of the polypeptides of the present invention. Antibodies from avian species may have particular advantage in detection of the polypeptides of the present invention, in human serum or tissues (Vikinge et al., Biosens. Bioelectron. 13: 1257-1262 (1998). Following immunization, the antibodies of the present invention can be obtained using any art-accepted technique. Such techniques are well known in the art and are described in detail in references such as Coligan, supra; Zola, supra; Howard et al. (eds.), Basic Methods in Antibody Production and Characterization, CRC Press (2000); Harlow, supra; Davis (ed.), Monoclonal Antibody Protocols, Vol. 45, Humana Press (1995); Delves (ed.), Antibody Production: Essential Techniques, John Wiley & Son Ltd (1997); and Kenney, Antibody Solution: An Antibody Methods Manual, Chapman & Hall (1997).

[0269] Briefly, such techniques include, inter alia, production of monoclonal antibodies by hybridomas and expression of antibodies or fragments or derivatives thereof from host cells engineered to express immunoglobulin genes or fragments thereof. These two methods of production are not mutually exclusive: genes encoding antibodies specific for the polypeptides of the present invention can be cloned from hybridomas and thereafter expressed in other host cells. Nor need the two necessarily be performed together: e.g., genes encoding antibodies specific for the polypeptides of the present invention can be cloned directly from B cells known to be specific for the desired protein, as further described in U.S. Pat. No. 5,627,052, the disclosure of which is incorporated herein by reference in its entirety, or from antibody-displaying phage.

[0270] Recombinant expression in host cells is particularly useful when fragments or derivatives of the antibodies of the present invention are desired.

[0271] Host cells for recombinant antibody production of whole antibodies, antibody fragments, or antibody derivatives can be prokaryotic or eukaryotic.

[0272] Prokaryotic hosts are particularly useful for producing phage displayed antibodies of the present invention.

[0273] The technology of phage-displayed antibodies, in which antibody variable region fragments are fused, for example, to the gene III protein (pIII) or gene VIII protein (pVIII) for display on the surface of filamentous phage, such as M13, is by now well-established. See, e.g., Sidhu, Curr. Opin. Biotechnol. 11(6): 610-6 (2000); Griffiths et al., Curr. Opin. Biotechnol. 9(1): 102-8 (1998); Hoogenboom et al., Immunotechnology, 4(1): 1-20 (1998); Rader et al., Current Opinion in Biotechnology 8: 503-508 (1997); Aujame et al., Human Antibodies 8: 155-168 (1997); Hoogenboom, Trends in Biotechnol. 15: 62-70 (1997); de Kruif et al., 17: 453-455 (1996); Barbas et al., Trends in Biotechnol. 14: 230-234 (1996); Winter et al., Ann. Rev. Immunol. 433-455 (1994). Techniques and protocols required to generate, propagate, screen (pan), and use the antibody fragments from such libraries have recently been compiled. See, e.g., Barbas (2001), supra; Kay, supra; and Abelson, supra.

[0274] Typically, phage-displayed antibody fragments are scFv fragments or Fab fragments; when desired, full length antibodies can be produced by cloning the variable regions from the displaying phage into a complete antibody and expressing the full length antibody in a further prokaryotic or a eukaryotic host cell. Eukaryotic cells are also useful for expression of the antibodies, antibody fragments, and antibody derivatives of the present invention. For example, antibody fragments of the present invention can be produced in Pichia pastoris and in Saccharomyces cerevisiae. See, e.g., Takahashi et al., Biosci. Biotechnol. Biochem. 64(10): 2138-44 (2000); Freyre et al., J. Biotechnol. 76(2-3):1 57-63 (2000); Fischer et al., Biotechnol. Appl. Biochem. 30 (Pt 2): 117-20 (1999); Pennell et al., Res. Immunol. 149(6): 599-603 (1998); Eldin et al., J. Immunol. Methods. 201(1): 67-75 (1997); Frenken et al., Res. Immunol. 149(6): 589-99 (1998); and Shusta et al., Nature Biotechnol. 16(8): 773-7 (1998).

[0275] Antibodies, including antibody fragments and derivatives, of the present invention can also be produced in insect cells. See, e.g., Li et al., Protein Expr. Purif. 21(1): 121-8 (2001); Ailor et al., Biotechnol. Bioeng. 58(2-3): 196-203 (1998); Hsu et al., Biotechnol. Prog. 13(1): 96-104 (1997); Edelman et al., Immunology 91(1): 13-9 (1997); and Nesbit et al., J. Immunol. Methods 151(1-2): 201-8 (1992).

[0276] Antibodies and fragments and derivatives thereof of the present invention can also be produced in plant cells, particularly maize or tobacco, Giddings et al., Nature Biotechnol. 18(11): 1151-5 (2000); Gavilondo et al., Biotechniques 29(1): 128-38 (2000); Fischer et al., J. Biol. Regul. Homeost. Agents 14(2): 83-92 (2000); Fischer et al., Biotechnol. Appl. Biochem. 30 (Pt 2): 113-6 (1999); Fischer et al., Biol. Chem. 380(7-8): 825-39 (1999); Russell, Curr. Top. Microbiol. Immunol. 240: 119-38 (1999); and Ma et al., Plant Physiol. 109(2): 341-6 (1995).

[0277] Antibodies, including antibody fragments and derivatives, of the present invention can also be produced in transgenic, non-human, mammalian milk. See, e.g. Pollock et al., J. Immunol Methods. 231: 147-57 (1999); Young et al., Res. Immunol. 149: 609-10 (1998); and Limonta et al., Immunotechnology 1: 107-13 (1995).

[0278] Mammalian cells useful for recombinant expression of antibodies, antibody fragments, and antibody derivatives of the present invention include CHO cells, COS cells, 293 cells, and myeloma cells. Verma et al., J. Immunol. Methods 216(1-2):165-81 (1998) review and compare bacterial, yeast, insect and mammalian expression systems for expression of antibodies. Antibodies of the present invention can also be prepared by cell free translation, as further described in Merk et al., J. Biochem. (Tokyo) 125(2): 328-33 (1999) and Ryabova et al., Nature Biotechnol. 15(1): 79-84 (1997), and in the milk of transgenic animals, as further described in Pollock et al., J. Immunol. Methods 231(1-2): 147-57 (1999).

[0279] The invention further provides antibody fragments that bind specifically to one or more of the polypeptides of the present invention, to one or more of the polypeptides encoded by the isolated nucleic acid molecules of the present invention, or the binding of which can be competitively inhibited by one or more of the polypeptides of the present invention or one or more of the polypeptides encoded by the isolated nucleic acid molecules of the present invention. Among such useful fragments are Fab, Fab′, Fv, F(ab)′₂, and single chain Fv (scFv) fragments. Other useful fragments are described in Hudson, Curr. Opin. Biotechnol. 9(4): 395-402 (1998).

[0280] The present invention also relates to antibody derivatives that bind specifically to one or more of the polypeptides of the present invention, to one or more of the polypeptides encoded by the isolated nucleic acid molecules of the present invention, or the binding of which can be competitively inhibited by one or more of the polypeptides of the present invention or one or more of the polypeptides encoded by the isolated nucleic acid molecules of the present invention.

[0281] Among such useful derivatives are chimeric, primatized, and humanized antibodies; such derivatives are less immunogenic in human beings, and thus are more suitable for in vivo administration, than are unmodified antibodies from non-human mammalian species. Another useful method is PEGylation to increase the serum half life of the antibodies.

[0282] Chimeric antibodies typically include heavy and/or light chain variable regions (including both CDR and framework residues) of immunoglobulins of one species, typically mouse, fused to constant regions of another species, typically human. See, e.g., Morrison et al., Proc. Natl. Acad. Sci USA. 81(21): 6851-5 (1984); Sharon et al., Nature 309(5966): 364-7 (1984); Takeda et al., Nature 314(6010): 452-4 (1985); and U.S. Pat. No. 5,807,715 the disclosure of which is incorporated herein by reference in its entirety. Primatized and humanized antibodies typically include heavy and/or light chain CDRs from a murine antibody grafted into a non-human primate or human antibody V region framework, usually further comprising a human constant region, Riechmann et al., Nature 332(6162): 323-7 (1988); Co et al., Nature 351(6326): 501-2 (1991); and U.S. Pat. Nos. 6,054,297; 5,821,337; 5,770,196; 5,766,886; 5,821,123; 5,869,619; 6,180,377; 6,013,256; 5,693,761; and 6,180,370, the disclosures of which are incorporated herein by reference in their entireties. Other useful antibody derivatives of the invention include heteromeric antibody complexes and antibody fusions, such as diabodies (bispecific antibodies), single-chain diabodies, and intrabodies.

[0283] It is contemplated that the nucleic acids encoding the antibodies of the present invention can be operably joined to other nucleic acids forming a recombinant vector for cloning or for expression of the antibodies of the invention. Accordingly, the present invention includes any recombinant vector containing the coding sequences, or part thereof, whether for eukaryotic transduction, transfection or gene therapy. Such vectors may be prepared using conventional molecular biology techniques, known to those with skill in the art, and would comprise DNA encoding sequences for the immunoglobulin V-regions including framework and CDRs or parts thereof, and a suitable promoter either with or without a signal sequence for intracellular transport. Such vectors may be transduced or transfected into eukaryotic cells or used for gene therapy (Marasco et al., Proc. Natl. Acad. Sci. (USA) 90: 7889-7893 (1993); Duan et al., Proc. Natl. Acad. Sci. (USA) 91: 5075-5079 (1994), by conventional techniques, known to those with skill in the art.

[0284] The antibodies of the present invention, including fragments and derivatives thereof, can usefully be labeled. It is, therefore, another aspect of the present invention to provide labeled antibodies that bind specifically to one or more of the polypeptides of the present invention, to one or more of the polypeptides encoded by the isolated nucleic acid molecules of the present invention, or the binding of which can be competitively inhibited by one or more of the polypeptides of the present invention or one or more of the polypeptides encoded by the isolated nucleic acid molecules of the present invention. The choice of label depends, in part, upon the desired use.

[0285] For example, when the antibodies of the present invention are used for immunohistochemical staining of tissue samples, the label can usefully be an enzyme that catalyzes production and local deposition of a detectable product. Enzymes typically conjugated to antibodies to permit their immunohistochemical visualization are well known, and include alkaline phosphatase, β-galactosidase, glucose oxidase, horseradish peroxidase (HRP), and urease. Typical substrates for production and deposition of visually detectable products include o-nitrophenyl-beta-D-galactopyranoside (ONPG); o-phenylenediamine dihydrochloride (OPD); p-nitrophenyl phosphate (PNPP); p-nitrophenyl-beta-D-galactopryanoside (PNPG); 3′,3′-diaminobenzidine (DAB); 3-amino-9-ethylcarbazole (AEC); 4-chloro-1-naphthol (CN); 5-bromo-4-chloro-3-indolyl-phosphate (BCIP); ABTS®; BluoGal; iodonitrotetrazolium (INT); nitroblue tetrazolium chloride (NBT); phenazine methosulfate (PMS); phenolphthalein monophosphate (PMP); tetramethyl benzidine (TMB); tetranitroblue tetrazolium (TNBT); X-Gal; X-Gluc; and X-Glucoside.

[0286] Other substrates can be used to produce products for local deposition that are luminescent. For example, in the presence of hydrogen peroxide (H₂O₂), horseradish peroxidase (HRP) can catalyze the oxidation of cyclic diacylhydrazides, such as luminol. Immediately following the oxidation, the luminol is in an excited state (intermediate reaction product), which decays to the ground state by emitting light. Strong enhancement of the light emission is produced by enhancers, such as phenolic compounds. Advantages include high sensitivity, high resolution, and rapid detection without radioactivity and requiring only small amounts of antibody. See, e.g., Thorpe et al., Methods Enzymol. 133: 331-53 (1986); Kricka et al., J. Immunoassay 17(1): 67-83 (1996); and Lundqvist et al., J Biolumin. Chemilumin. 10(6): 353-9 (1995). Kits for such enhanced chemiluminescent detection (ECL) are available commercially. The antibodies can also be labeled using colloidal gold.

[0287] As another example, when the antibodies of the present invention are used, e.g., for flow cytometric detection, for scanning laser cytometric detection, or for fluorescent immunoassay, they can usefully be labeled with fluorophores. There are a wide variety of fluorophore labels that can usefully be attached to the antibodies of the present invention. For flow cytometric applications, both for extracellular detection and for intracellular detection, common useful fluorophores can be fluorescein isothiocyanate (FITC), allophycocyanin (APC), R-phycoerythrin (PE), peridinin chlorophyll protein (PerCP), Texas Red, Cy3, Cy5, fluorescence resonance energy tandem fluorophores such as PerCP-Cy5.5, PE-Cy5, PE-Cy5.5, PE-Cy7, PE-Texas Red, and APC-Cy7.

[0288] Other fluorophores include, inter alia, Alexa Fluor® 350, Alexa Fluor® 488, Alexa Fluor® 532, Alexa Fluor® 546, Alexa Fluor® 568, Alexa Fluor® 594, Alexa Fluor® 647 (monoclonal antibody labeling kits available from Molecular Probes, Inc., Eugene, Oreg., USA), BODIPY dyes, such as BODIPY 493/503, BODIPY FL, BODIPY R6G, BODIPY 530/550, BODIPY TMR, BODIPY 558/568, BODIPY 558/568, BODIPY 564/570, BODIPY 576/589, BODIPY 581/591, BODIPY TR, BODIPY 630/650, BODIPY 650/665, Cascade Blue, Cascade Yellow, Dansyl, lissamine rhodamine B, Marina Blue, Oregon Green 488, Oregon Green 514, Pacific Blue, rhodamine 6G, rhodamine green, rhodamine red, tetramethylrhodamine, Texas Red (available from Molecular Probes, Inc., Eugene, Oreg., USA), and Cy2, Cy3, Cy3.5, Cy5, Cy5.5, Cy7, all of which are also useful for fluorescently labeling the antibodies of the present invention. For secondary detection using labeled avidin, streptavidin, captavidin or neutravidin, the antibodies of the present invention can usefully be labeled with biotin.

[0289] When the antibodies of the present invention are used, e.g., for western blotting applications, they can usefully be labeled with radioisotopes, such as ³³P, ³²P, ³⁵S, ³H, and ¹²⁵I. As another example, when the antibodies of the present invention are used for radioimmunotherapy, the label can usefully be ²²⁸Th, ²²⁷Ac, ²²⁵Ac, ²²³Ra, ²¹³Bi, ²¹²Pb, ²¹²Bi, ²¹¹At, ²⁰³Pb, ¹⁹⁴Os, ¹⁸⁸Re, ¹⁸⁶Re, ¹⁵³Sm, ¹⁴⁹Tb, ¹³¹I, ¹²⁵I, ¹¹¹In, ¹⁰⁵Rh, ^{99m}Tc, ⁹⁷Ru, ⁹⁰Y, ⁹⁰Sr, ⁸⁸Y, ⁷²Se, ⁶⁷Cu, or ⁴⁷Sc.

[0290] As another example, when the antibodies of the present invention are to be used for in vivo diagnostic use, they can be rendered detectable by conjugation to MRI contrast agents, such as gadolinium diethylenetriaminepentaacetic acid (DTPA), Lauffer et al., Radiology 207(2): 529-38 (1998), or by radioisotopic labeling.

[0291] As would be understood, use of the labels described above is not restricted to the application as for which they were mentioned.

[0292] The antibodies of the present invention, including fragments and derivatives thereof, can also be conjugated to toxins, in order to target the toxin's ablative action to cells that display and/or express the polypeptides of the present invention. Commonly, the antibody in such immunotoxins is conjugated to Pseudomonas exotoxin A, diphtheria toxin, shiga toxin A, anthrax toxin lethal factor, or ricin. See Hall (ed.), Immunotoxin Methods and Protocols (Methods in Molecular Biology, vol. 166), Humana Press (2000); and Frankel et al. (eds.), Clinical Applications of Immunotoxins, Springer-Verlag (1998).

[0293] The antibodies of the present invention can usefully be attached to a substrate, and it is, therefore, another aspect of the invention to provide antibodies that bind specifically to one or more of the polypeptides of the present invention, to one or more of the polypeptides encoded by the isolated nucleic acid molecules of the present invention, or the binding of which can be competitively inhibited by one or more of the polypeptides of the present invention or one or more of the polypeptides encoded by the isolated nucleic acid molecules of the present invention, attached to a substrate. Substrates can be porous or nonporous, planar or nonplanar. For example, the antibodies of the present invention can usefully be conjugated to filtration media, such as NHS-activated Sepharose or CNBr-activated Sepharose for purposes of immunoaffinity chromatography. For example, the antibodies of the present invention can usefully be attached to paramagnetic microspheres, typically by biotin-streptavidin interaction, which microsphere can then be used for isolation of cells that express or display the polypeptides of the present invention. As another example, the antibodies of the present invention can usefully be attached to the surface of a microtiter plate for ELISA.

[0294] As noted above, the antibodies of the present invention can be produced in prokaryotic and eukaryotic cells. It is, therefore, another aspect of the present invention to provide cells that express the antibodies of the present invention, including hybridoma cells, B cells, plasma cells, and host cells recombinantly modified to express the antibodies of the present invention.

[0295] In yet a further aspect, the present invention provides aptamers evolved to bind specifically to one or more of the ESPs of the present invention or to polypeptides encoded by the ESNAs of the invention.

[0296] In sum, one of skill in the art, provided with the teachings of this invention, has available a variety of methods which may be used to alter the biological properties of the antibodies of this invention including methods which would increase or decrease the stability or half-life, immunogenicity, toxicity, affinity or yield of a given antibody molecule, or to alter it in any other way that may render it more suitable for a particular application.

Transgenic Animals and Cells

[0297] In another aspect, the invention provides transgenic cells and non-human organisms comprising nucleic acid molecules of the invention. In a preferred embodiment, the transgenic cells and non-human organisms comprise a nucleic acid molecule encoding a ESP. In a preferred embodiment, the ESP comprises an amino acid sequence selected from SEQ ID NO: 473-666, or a fragment, mutein, homologous protein or allelic variant thereof. In another preferred embodiment, the transgenic cells and non-human organism comprise a ESNA of the invention, preferably a ESNA comprising a nucleotide sequence selected from the group consisting of SEQ ID NO: 1472, or a part, substantially similar nucleic acid molecule, allelic variant or hybridizing nucleic acid molecule thereof.

[0298] In another embodiment, the transgenic cells and non-human organisms have a targeted disruption or replacement of the endogenous orthologue of the human ESG. The transgenic cells can be embryonic stem cells or somatic cells. The transgenic non-human organisms can be chimeric, nonchimeric heterozygotes, and nonchimeric homozygotes. Methods of producing transgenic animals are well known in the art. See, e.g., Hogan et al., Manipulating the Mouse Embryo: A Laboratory Manual, 2d ed., Cold Spring Harbor Press (1999); Jackson et al., Mouse Genetics and Transgenics: A Practical Approach, Oxford University Press (2000); and Pinkert, Transgenic Animal Technology: A Laboratory Handbook, Academic Press (1999).

[0299] Any technique known in the art may be used to introduce a nucleic acid molecule of the invention into an animal to produce the founder lines of transgenic animals. Such techniques include, but are not limited to, pronuclear microinjection. (see, e.g., Paterson et al., Appl. Microbiol. Biotechnol. 40: 691-698 (1994); Carver et al., Biotechnology 11: 1263-1270 (1993); Wright et al., Biotechnology 9: 830-834 (1991); and U.S. Pat. No. 4,873,191, herein incorporated by reference in its entirety); retrovirus-mediated gene transfer into germ lines, blastocysts or embryos (see, e.g., Van der Putten et al., Proc. Natl. Acad. Sci. USA 82: 6148-6152 (1985)); gene targeting in embryonic stem cells (see, e.g., Thompson et al., Cell 56: 313-321 (1989)); electroporation of cells or embryos (see, e.g., Lo, 1983, Mol. Cell. Biol. 3: 1803-1814 (1983)); introduction using a gene gun (see, e.g., Ulmer et al., Science 259: 174549 (1993); introducing nucleic acid constructs into embryonic pleuripotent stem cells and transferring the stem cells back into the blastocyst; and sperm-mediated gene transfer (see, e.g., Lavitrano et al., Cell 57: 717-723 (1989)).

[0300] Other techniques include, for example, nuclear transfer into enucleated oocytes of nuclei from cultured embryonic, fetal, or adult cells induced to quiescence (see, e.g., Campell et al., Nature 380: 64-66 (1996); Wilmut et al., Nature 385: 810-813 (1997)). The present invention provides for transgenic animals that carry the transgene (i.e., a nucleic acid molecule of the invention) in all their cells, as well as animals which carry the transgene in some, but not all their cells, i.e. e., mosaic animals or chimeric animals.

[0301] The transgene may be integrated as a single transgene or as multiple copies, such as in concatamers, e.g., head-to-head tandems or head-to-tail tandems. The transgene may also be selectively introduced into and activated in a particular cell type by following, e.g., the teaching of Lasko et al. et al., Proc. Natl. Acad. Sci. USA 89: 6232-6236 (1992). The regulatory sequences required for such a cell-type specific activation will depend upon the particular cell type of interest, and will be apparent to those of skill in the art.

[0302] Once transgenic animals have been generated, the expression of the recombinant gene may be assayed utilizing standard techniques. Initial screening may be accomplished by Southern blot analysis or PCR techniques to analyze animal tissues to verify that integration of the transgene has taken place. The level of mRNA expression of the transgene in the tissues of the transgenic animals may also be assessed using techniques which include, but are not limited to, Northern blot analysis of tissue samples obtained from the animal, in situ hybridization analysis, and reverse transcriptase-PCR (RT-PCR). Samples of transgenic gene-expressing tissue may also be evaluated immunocytochemically or immunohistochemically using antibodies specific for the transgene product.

[0303] Once the founder animals are produced, they may be bred, inbred, outbred, or crossbred to produce colonies of the particular animal. Examples of such breeding strategies include, but are not limited to: outbreeding of founder animals with more than one integration site in order to establish separate lines; inbreeding of separate lines in order to produce compound transgenics that express the transgene at higher levels because of the effects of additive expression of each transgene; crossing of heterozygous transgenic animals to produce animals homozygous for a given integration site in order to both augment expression and eliminate the need for screening of animals by DNA analysis; crossing of separate homozygous lines to produce compound heterozygous or homozygous lines; and breeding to place the transgene on a distinct background that is appropriate for an experimental model of interest.

[0304] Transgenic animals of the invention have uses which include, but are not limited to, animal model systems useful in elaborating the biological function of polypeptides of the present invention, studying conditions and/or disorders associated with aberrant expression, and in screening for compounds effective in ameliorating such conditions and/or disorders.

[0305] Methods for creating a transgenic animal with a disruption of a targeted gene are also well known in the art. In general, a vector is designed to comprise some nucleotide sequences homologous to the endogenous targeted gene. The vector is introduced into a cell so that it may integrate, via homologous recombination with chromosomal sequences, into the endogenous gene, thereby disrupting the function of the endogenous gene. The transgene may also be selectively introduced into a particular cell type, thus inactivating the endogenous gene in only that cell type. See, e.g., Gu et al., Science 265: 103-106 (1994). The regulatory sequences required for such a cell-type specific inactivation will depend upon the particular cell type of interest, and will be apparent to those of skill in the art. See, e.g., Smithies et al., Nature 317: 230-234 (1985); Thomas et al., Cell 51: 503-512 (1987); Thompson et al., Cell 5: 313-321 (1989).

[0306] In one embodiment, a mutant, non-functional nucleic acid molecule of the invention (or a completely unrelated DNA sequence) flanked by DNA homologous to the endogenous nucleic acid sequence (either the coding regions or regulatory regions of the gene) can be used, with or without a selectable marker and/or a negative selectable marker, to transfect cells that express polypeptides of the invention in vivo. In another embodiment, techniques known in the art are used to generate knockouts in cells that contain, but do not express the gene of interest. Insertion of the DNA construct, via targeted homologous recombination, results in inactivation of the targeted gene. Such approaches are particularly suited in research and agricultural fields where modifications to embryonic stem cells can be used to generate animal offspring with an inactive targeted gene. See, e.g., Thomas, supra and Thompson, supra. However this approach can be routinely adapted for use in humans provided the recombinant DNA constructs are directly administered or targeted to the required site in vivo using appropriate viral vectors that will be apparent to those of skill in the art.

[0307] In further embodiments of the invention, cells that are genetically engineered to express the polypeptides of the invention, or alternatively, that are genetically engineered not to express the polypeptides of the invention (e.g., knockouts) are administered to a patient in vivo. Such cells may be obtained from an animal or patient or an MHC compatible donor and can include, but are not limited to fibroblasts, bone marrow cells, blood cells (e.g., lymphocytes), adipocytes, muscle cells, endothelial cells etc. The cells are genetically engineered in vitro using recombinant DNA techniques to introduce the coding sequence of polypeptides of the invention into the cells, or alternatively, to disrupt the coding sequence and/or endogenous regulatory sequence associated with the polypeptides of the invention, e.g., by transduction (using viral vectors, and preferably vectors that integrate the transgene into the cell genome) or transfection procedures, including, but not limited to, the use of plasmids, cosmids, YACs, naked DNA, electroporation, liposomes, etc.

[0308] The coding sequence of the polypeptides of the invention can be placed under the control of a strong constitutive or inducible promoter or promoter/enhancer to achieve expression, and preferably secretion, of the polypeptides of the invention. The engineered cells which express and preferably secrete the polypeptides of the invention can be introduced into the patient systemically, e.g., in the circulation, or intraperitoneally.

[0309] Alternatively, the cells can be incorporated into a matrix and implanted in the body, e.g., genetically engineered fibroblasts can be implanted as part of a skin graft; genetically engineered endothelial cells can be implanted as part of a lymphatic or vascular graft. See, e.g., U.S. Pat. Nos. 5,399,349 and 5,460,959, each of which is incorporated by reference herein in its entirety.

[0310] When the cells to be administered are non-autologous or non-MHC compatible cells, they can be administered using well known techniques which prevent the development of a host immune response against the introduced cells. For example, the cells may be introduced in an encapsulated form which, while allowing for an exchange of components with the immediate extracellular environment, does not allow the introduced cells to be recognized by the host immune system.

[0311] Transgenic and “knock-out” animals of the invention have uses which include, but are not limited to, animal model systems useful in elaborating the biological function of polypeptides of the present invention, studying conditions and/or disorders associated with aberrant expression, and in screening for compounds effective in ameliorating such conditions and/or disorders.

Computer Readable Means

[0312] A further aspect of the invention is a computer readable means for storing the nucleic acid and amino acid sequences of the instant invention. In a preferred embodiment, the invention provides a computer readable means for storing SEQ ID NO: 473-666 and SEQ ID NO: 1472 as described herein, as the complete set of sequences or in any combination. The records of the computer readable means can be accessed for reading and display and for interface with a computer system for the application of programs allowing for the location of data upon a query for data meeting certain criteria, the comparison of sequences, the alignment or ordering of sequences meeting a set of criteria, and the like.

[0313] The nucleic acid and amino acid sequences of the invention are particularly useful as components in databases useful for search analyses as well as in sequence analysis algorithms. As used herein, the terms “nucleic acid sequences of the invention” and “amino acid sequences of the invention” mean any detectable chemical or physical characteristic of a polynucleotide or polypeptide of the invention that is or may be reduced to or stored in a computer readable form. These include, without limitation, chromatographic scan data or peak data, photographic data or scan data therefrom, and mass spectrographic data.

[0314] This invention provides computer readable media having stored thereon sequences of the invention. A computer readable medium may comprise one or more of the following: a nucleic acid sequence comprising a sequence of a nucleic acid sequence of the invention; an amino acid sequence comprising an amino acid sequence of the invention; a set of nucleic acid sequences wherein at least one of said sequences comprises the sequence of a nucleic acid sequence of the invention; a set of amino acid sequences wherein at least one of said sequences comprises the sequence of an amino acid sequence of the invention; a data set representing a nucleic acid sequence comprising the sequence of one or more nucleic acid sequences of the invention; a data set representing a nucleic acid sequence encoding an amino acid sequence comprising the sequence of an amino acid sequence of the invention; a set of nucleic acid sequences wherein at least one of said sequences comprises the sequence of a nucleic acid sequence of the invention; a set of amino acid sequences wherein at least one of said sequences comprises the sequence of an amino acid sequence of the invention; a data set representing a nucleic acid sequence comprising the sequence of a nucleic acid sequence of the invention; a data set representing a nucleic acid sequence encoding an amino acid sequence comprising the sequence of an amino acid sequence of the invention. The computer readable medium can be any composition of matter used to store information or data, including, for example, commercially available floppy disks, tapes, hard drives, compact disks, and video disks.

[0315] Also provided by the invention are methods for the analysis of character sequences, particularly genetic sequences. Preferred methods of sequence analysis include, for example, methods of sequence homology analysis, such as identity and similarity analysis, RNA structure analysis, sequence assembly, cladistic analysis, sequence motif analysis, open reading frame determination, nucleic acid base calling, and sequencing chromatogram peak analysis.

[0316] A computer-based method is provided for performing nucleic acid sequence identity or similarity identification. This method comprises the steps of providing a nucleic acid sequence comprising the sequence of a nucleic acid of the invention in a computer readable medium; and comparing said nucleic acid sequence to at least one nucleic acid or amino acid sequence to identify sequence identity or similarity.

[0317] A computer-based method is also provided for performing amino acid homology identification, said method comprising the steps of: providing an amino acid sequence comprising the sequence of an amino acid of the invention in a computer readable medium; and comparing said amino acid sequence to at least one nucleic acid or an amino acid sequence to identify homology.

[0318] A computer-based method is still further provided for assembly of overlapping nucleic acid sequences into a single nucleic acid sequence, said method comprising the steps of: providing a first nucleic acid sequence comprising the sequence of a nucleic acid of the invention in a computer readable medium; and screening for at least one overlapping region between said first nucleic acid sequence and a second nucleic acid sequence. In addition, the invention includes a method of using patterns of expression associated with either the nucleic acids or proteins in a computer-based method to diagnose disease.

Diagnostic Methods for Endometrial Cancer

[0319] The present invention also relates to quantitative and qualitative diagnostic assays and methods for detecting, diagnosing, monitoring, staging and predicting cancers by comparing expression of a ESNA or a ESP in a human patient that has or may have endometrial cancer, or who is at risk of developing endometrial cancer, with the expression of a ESNA or a ESP in a normal human control. For purposes of the present invention, “expression of a ESNA” or “ESNA expression” means the quantity of ESNA mRNA that can be measured by any method known in the art or the level of transcription that can be measured by any method known in the art in a cell, tissue, organ or whole patient. Similarly, the term “expression of a ESP” or “ESP expression” means the amount of ESP that can be measured by any method known in the art or the level of translation of a ESNA that can be measured by any method known in the art.

[0320] The present invention provides methods for diagnosing endometrial cancer in a patient, by analyzing for changes in levels of ESNA or ESP in cells, tissues, organs or bodily fluids compared with levels of ESNA or ESP in cells, tissues, organs or bodily fluids of preferably the same type from a normal human control, wherein an increase, or decrease in certain cases, in levels of a ESNA or ESP in the patient versus the normal human control is associated with the presence of endometrial cancer or with a predilection to the disease. In another preferred embodiment, the present invention provides methods for diagnosing endometrial cancer in a patient by analyzing changes in the structure of the mRNA of a ESG compared to the mRNA from a normal control. These changes include, without limitation, aberrant splicing, alterations in polyadenylation and/or alterations in 5′ nucleotide capping. In yet another preferred embodiment, the present invention provides methods for diagnosing endometrial cancer in a patient by analyzing changes in a ESP compared to a ESP from a normal patient. These changes include, e.g. alterations, including post translational modifications such as glycosylation and/or phosphorylation of the ESP or changes in the subcellular ESP localization.

[0321] For purposes of the present invention, diagnosing means that ESNA or ESP levels are used to determine the presence or absence of disease in a patient. As will be understood by those of skill in the art, measurement of other diagnostic parameters may be required for definitive diagnosis or determination of the appropriate treatment for the disease. The determination may be made by a clinician, a doctor, a testing laboratory, or a patient using an over the counter test. The patient may have symptoms of disease or may be asymptomatic. In addition, the ESNA or ESP levels of the present invention may be used as screening marker to determine whether further tests or biopsies are warranted. In addition, the ESNA or ESP levels may be used to determine the vulnerability or susceptibility to disease.

[0322] In a preferred embodiment, the expression of a ESNA is measured by determining the amount of a mRNA that encodes an amino acid sequence selected from SEQ ID NO: 473-666, a homolog, an allelic variant, or a fragment thereof. In a more preferred embodiment, the ESNA expression that is measured is the level of expression of a ESNA mRNA selected from SEQ ID NO: 1-472, or a hybridizing nucleic acid, homologous nucleic acid or allelic variant thereof, or a part of any of these nucleic acid molecules. ESNA expression may be measured by any method known in the art, such as those described supra, including measuring mRNA expression by Northern blot, quantitative or qualitative reverse transcriptase PCR (RT-PCR), microarray, dot or slot blots or in situ hybridization. See, e.g., Ausubel (1992), supra; Ausubel (1999), supra; Sambrook (1989), supra; and Sambrook (2001), supra. ESNA transcription may be measured by any method known in the art including using a reporter gene hooked up to the promoter of a ESG of interest or doing nuclear run-off assays. Alterations in mRNA structure, e.g., aberrant splicing variants, may be determined by any method known in the art, including, RT-PCR followed by sequencing or restriction analysis. As necessary, ESNA expression may be compared to a known control, such as normal endometrial nucleic acid, to detect a change in expression.

[0323] In another preferred embodiment, the expression of a ESP is measured by determining the level of a ESP having an amino acid sequence selected from the group consisting of SEQ ID NO: 473-666, a homolog, an allelic variant, or a fragment thereof. Such levels are preferably determined in at least one of cells, tissues, organs and/or bodily fluids, including determination of normal and abnormal levels. Thus, for instance, a diagnostic assay in accordance with the invention for diagnosing over- or underexpression of a ESNA or ESP compared to normal control bodily fluids, cells, or tissue samples may be used to diagnose the presence of endometrial cancer. The expression level of a ESP may be determined by any method known in the art, such as those described supra. In a preferred embodiment, the ESP expression level may be determined by radioimmunoassays, competitive-binding assays, ELISA, Western blot, FACS, immunohistochemistry, immunoprecipitation, proteomic approaches: two-dimensional gel electrophoresis (2D electrophoresis) and non-gel-based approaches such as mass spectrometry or protein interaction profiling. See, e.g, Harlow (1999), supra; Ausubel (1992), supra; and Ausubel (1999), supra. Alterations in the ESP structure may be determined by any method known in the art, including, e.g., using antibodies that specifically recognize phosphoserine, phosphothreonine or phosphotyrosine residues, two-dimensional polyacrylamide gel electrophoresis (2D PAGE) and/or chemical analysis of amino acid residues of the protein. Id.

[0324] In a preferred embodiment, a radioimmunoassay (RIA) or an ELISA is used. An antibody specific to a ESP is prepared if one is not already available. In a preferred embodiment, the antibody is a monoclonal antibody. The anti-ESP antibody is bound to a solid support and any free protein binding sites on the solid support are blocked with a protein such as bovine serum albumin. A sample of interest is incubated with the antibody on the solid support under conditions in which the ESP will bind to the anti-ESP antibody. The sample is removed, the solid support is washed to remove unbound material, and an anti-ESP antibody that is linked to a detectable reagent (a radioactive substance for RIA and an enzyme for ELISA) is added to the solid support and incubated under conditions in which binding of the ESP to the labeled antibody will occur. After binding, the unbound labeled antibody is removed by washing. For an ELISA, one or more substrates are added to produce a colored reaction product that is based upon the amount of an ESP in the sample. For an RIA, the solid support is counted for radioactive decay signals by any method known in the art. Quantitative results for both RIA and ELISA typically are obtained by reference to a standard curve.

[0325] Other methods to measure ESP levels are known in the art. For instance, a competition assay may be employed wherein an anti-ESP antibody is attached to a solid support and an allocated amount of a labeled ESP and a sample of interest are incubated with the solid support. The amount of labeled ESP attached to the solid support can be correlated to the quantity of a ESP in the sample.

[0326] Of the proteomic approaches, 2D PAGE is a well known technique. Isolation of individual proteins from a sample such as serum is accomplished using sequential separation of proteins by isoelectric point and molecular weight. Typically, polypeptides are first separated by isoelectric point (the first dimension) and then separated by size using an electric current (the second dimension). In general, the second dimension is perpendicular to the first dimension. Because no two proteins with different sequences are identical on the basis of both size and charge, the result of 2D PAGE is a roughly square gel in which each protein occupies a unique spot. Analysis of the spots with chemical or antibody probes, or subsequent protein microsequencing can reveal the relative abundance of a given protein and the identity of the proteins in the sample.

[0327] Expression levels of a ESNA can be determined by any method known in the art, including PCR and other nucleic acid methods, such as ligase chain reaction (LCR) and nucleic acid sequence based amplification (NASBA), can be used to detect malignant cells for diagnosis and monitoring of various malignancies. For example, reverse-transcriptase PCR (RT-PCR) is a powerful technique which can be used to detect the presence of a specific mRNA population in a complex mixture of thousands of other mRNA species. In RT-PCR, an mRNA species is first reverse transcribed to complementary DNA (cDNA) with use of the enzyme reverse transcriptase; the cDNA is then amplified as in a standard PCR reaction.

[0328] Hybridization to specific DNA molecules (e.g., oligonucleotides) arrayed on a solid support can be used to both detect the expression of and quantitate the level of expression of one or more ESNAs of interest. In this approach, all or a portion of one or more ESNAs is fixed to a substrate. A sample of interest, which may comprise RNA, e.g., total RNA or polyA-selected mRNA, or a complementary DNA (cDNA) copy of the RNA is incubated with the solid support under conditions in which hybridization will occur between the DNA on the solid support and the nucleic acid molecules in the sample of interest. Hybridization between the substrate-bound DNA and the nucleic acid molecules in the sample can be detected and quantitated by several means, including, without limitation, radioactive labeling or fluorescent labeling of the nucleic acid molecule or a secondary molecule designed to detect the hybrid.

[0329] The above tests can be carried out on samples derived from a variety of cells, bodily fluids and/or tissue extracts such as homogenates or solubilized tissue obtained from a patient. Tissue extracts are obtained routinely from tissue biopsy and autopsy material. Bodily fluids useful in the present invention include blood, urine, saliva or any other bodily secretion or derivative thereof. As used herein “blood” includes whole blood, plasma, serum, circulating epithelial cells, constituents, or any derivative of blood.

[0330] In addition to detection in bodily fluids, the proteins and nucleic acids of the invention are suitable to detection by cell capture technology. Whole cells may be captured by a variety methods for example magnetic separation, U.S. Pat. Nos. 5,200,084; 5,186,827; 5,108,933; 4,925,788, the disclosures of which are incorporated herein by reference in their entireties. Epithelial cells may be captured using such products as Dynabeads® or CELLection™ (Dynal Biotech, Oslo, Norway). Alternatively, fractions of blood may be captured, e.g., the buffy coat fraction (50 mm cells isolated from 5 ml of blood) containing epithelial cells. In addition, cancer cells may be captured using the techniques described in WO 00/47998, the disclosure of which is incorporated herein by reference in its entirety. Once the cells are captured or concentrated, the proteins or nucleic acids are detected by the means described in the subject application. Alternatively, nucleic acids may be captured directly from blood samples, see U.S. Pat. Nos. 6,156,504, 5,501,963; or WO 01/42504, the disclosures of which are incorporated herein by reference in their entireties.

[0331] In a preferred embodiment, the specimen tested for expression of ESNA or ESP includes without limitation endometrial tissue, endometrial cells grown in cell culture, blood, serum, lymph node tissue, and lymphatic fluid. In another preferred embodiment, especially when metastasis of a primary endometrial cancer is known or suspected, specimens include, without limitation, tissues from brain, bone, bone marrow, liver, lungs, colon, and adrenal glands. In general, the tissues may be sampled by biopsy, including, without limitation, needle biopsy, e.g., transthoracic needle aspiration, cervical mediatinoscopy, endoscopic lymph node biopsy, video-assisted thoracoscopy, exploratory thoracotomy, bone marrow biopsy and bone marrow aspiration.

[0332] All the methods of the present invention may optionally include determining the expression levels of one or more other cancer markers in addition to determining the expression level of a ESNA or ESP. In many cases, the use of another cancer marker will decrease the likelihood of false positives or false negatives. In one embodiment, the one or more other cancer markers include other ESNA or ESPs as disclosed herein. Other cancer markers useful in the present invention will depend on the cancer being tested and are known to those of skill in the art. In a preferred embodiment, at least one other cancer marker in addition to a particular ESNA or ESP is measured. In a more preferred embodiment, at least two other additional cancer markers are used. In an even more preferred embodiment, at least three, more preferably at least five, even more preferably at least ten additional cancer markers are used.

[0333] Diagnosing

[0334] In one aspect, the invention provides a method for determining the expression levels and/or structural alterations of one or more ESNA and/or ESP in a sample from a patient suspected of having endometrial cancer. In general, the method comprises the steps of obtaining the sample from the patient, determining the expression level or structural alterations of a ESNA and/or ESP and then ascertaining whether the patient has endometrial cancer from the expression level of the ESNA or ESP. In general, if high expression relative to a control of a ESNA or ESP is indicative of endometrial cancer, a diagnostic assay is considered positive if the level of expression of the ESNA or ESP is at least one and a half times higher, and more preferably are at least two times higher, still more preferably five times higher, even more preferably at least ten times higher, than in preferably the same cells, tissues or bodily fluid of a normal human control. In contrast, if low expression relative to a control of a ESNA or ESP is indicative of endometrial cancer, a diagnostic assay is considered positive if the level of expression of the ESNA or ESP is at least one and a half times lower, and more preferably are at least two times lower, still more preferably five times lower, even more preferably at least ten times lower than in preferably the same cells, tissues or bodily fluid of a normal human control. The normal human control may be from a different patient or from uninvolved tissue of the same patient.

[0335] The present invention also provides a method of determining whether endometrial cancer has metastasized in a patient. One may identify whether the endometrial cancer has metastasized by measuring the expression levels and/or structural alterations of one or more ESNAs and/or ESPs in a variety of tissues. The presence of a ESNA or ESP in a certain tissue at levels higher than that of corresponding noncancerous tissue (e.g., the same tissue from another individual) is indicative of metastasis if high level expression of a ESNA or ESP is associated with endometrial cancer. Similarly, the presence of a ESNA or ESP in a tissue at levels lower than that of corresponding noncancerous tissue is indicative of metastasis if low level expression of a ESNA or ESP is associated with endometrial cancer. Further, the presence of a structurally altered ESNA or ESP that is associated with endometrial cancer is also indicative of metastasis.

[0336] In general, if high expression relative to a control of a ESNA or ESP is indicative of metastasis, an assay for metastasis is considered positive if the level of expression of the ESNA or ESP is at least one and a half times higher, and more preferably are at least two times higher, still more preferably five times higher, even more preferably at least ten times higher, than in preferably the same cells, tissues or bodily fluid of a normal human control. In contrast, if low expression relative to a control of a ESNA or ESP is indicative of metastasis, an assay for metastasis is considered positive if the level of expression of the ESNA or ESP is at least one and a half times lower, and more preferably are at least two times lower, still more preferably five times lower, even more preferably at least ten times lower than in preferably the same cells, tissues or bodily fluid of a normal human control.

[0337] Staging

[0338] The invention also provides a method of staging endometrial cancer in a human patient. The method comprises identifying a human patient having endometrial cancer and analyzing cells, tissues or bodily fluids from such human patient for expression levels and/or structural alterations of one or more ESNAs or ESPs. First, one or more tumors from a variety of patients are staged according to procedures well known in the art, and the expression levels of one or more ESNAs or ESPs is determined for each stage to obtain a standard expression level for each ESNA and ESP. Then, the ESNA or ESP expression levels of the ESNA or ESP are determined in a biological sample from a patient whose stage of cancer is not known. The ESNA or ESP expression levels from the patient are then compared to the standard expression level. By comparing the expression level of the ESNAs and ESPs from the patient to the standard expression levels, one may determine the stage of the tumor. The same procedure may be followed using structural alterations of a ESNA or ESP to determine the stage of a endometrial cancer.

[0339] Monitoring

[0340] Further provided is a method of monitoring endometrial cancer in a human patient. One may monitor a human patient to determine whether there has been metastasis and, if there has been, when metastasis began to occur. One may also monitor a human patient to determine whether a preneoplastic lesion has become cancerous. One may also monitor a human patient to determine whether a therapy, e.g., chemotherapy, radiotherapy or surgery, has decreased or eliminated the endometrial cancer. The monitoring may determine if there has been a reoccurrence and, if so, determine its nature. The method comprises identifying a human patient that one wants to monitor for endometrial cancer, periodically analyzing cells, tissues or bodily fluids from such human patient for expression levels of one or more ESNAs or ESPs, and comparing the ESNA or ESP levels over time to those ESNA or ESP expression levels obtained previously. Patients may also be monitored by measuring one or more structural alterations in a ESNA or ESP that are associated with endometrial cancer.

[0341] If increased expression of a ESNA or ESP is associated with metastasis, treatment failure, or conversion of a preneoplastic lesion to a cancerous lesion, then detecting an increase in the expression level of a ESNA or ESP indicates that the tumor is metastasizing, that treatment has failed or that the lesion is cancerous, respectively. One having ordinary skill in the art would recognize that if this were the case, then a decreased expression level would be indicative of no metastasis, effective therapy or failure to progress to a neoplastic lesion. If decreased expression of a ESNA or ESP is associated with metastasis, treatment failure, or conversion of a preneoplastic lesion to a cancerous lesion, then detecting a decrease in the expression level of a ESNA or ESP indicates that the tumor is metastasizing, that treatment has failed or that the lesion is cancerous, respectively. In a preferred embodiment, the levels of ESNAs or ESPs are determined from the same cell type, tissue or bodily fluid as prior patient samples. Monitoring a patient for onset of endometrial cancer metastasis is periodic and preferably is done on a quarterly basis, but may be done more or less frequently.

[0342] The methods described herein can further be utilized as prognostic assays to identify subjects having or at risk of developing a disease or disorder associated with increased or decreased expression levels of a ESNA and/or ESP. The present invention provides a method in which a test sample is obtained from a human patient and one or more ESNAs and/or ESPs are detected. The presence of higher (or lower) ESNA or ESP levels as compared to normal human controls is diagnostic for the human patient being at risk for developing cancer, particularly endometrial cancer. The effectiveness of therapeutic agents to decrease (or increase) expression or activity of one or more ESNAs and/or ESPs of the invention can also be monitored by analyzing levels of expression of the ESNAs and/or ESPs in a human patient in clinical trials or in in vitro screening assays such as in human cells. In this way, the gene expression pattern can serve as a marker, indicative of the physiological response of the human patient or cells, as the case may be, to the agent being tested.

[0343] Detection of Genetic Lesions or Mutations

[0344] The methods of the present invention can also be used to detect genetic lesions or mutations in a ESG, thereby determining if a human with the genetic lesion is susceptible to developing endometrial cancer or to determine what genetic lesions are responsible, or are partly responsible, for a person's existing endometrial cancer. Genetic lesions can be detected, for example, by ascertaining the existence of a deletion, insertion and/or substitution of one or more nucleotides from the ESGs of this invention, a chromosomal rearrangement of a ESG, an aberrant modification of a ESG (such as of the methylation pattern of the genomic DNA), or allelic loss of a ESG. Methods to detect such lesions in the ESG of this invention are known to those having ordinary skill in the art following the teachings of the specification.

Methods of Detecting Noncancerous endometrial Diseases

[0345] The present invention also provides methods for determining the expression levels and/or structural alterations of one or more ESNAs and/or ESPs in a sample from a patient suspected of having or known to have a noncancerous endometrial disease. In general, the method comprises the steps of obtaining a sample from the patient, determining the expression level or structural alterations of a ESNA and/or ESP, comparing the expression level or structural alteration of the ESNA or ESP to a normal endometrial control, and then ascertaining whether the patient has a noncancerous endometrial disease. In general, if high expression relative to a control of a ESNA or ESP is indicative of a particular noncancerous endometrial disease, a diagnostic assay is considered positive if the level of expression of the ESNA or ESP is at least two times higher, and more preferably are at least five times higher, even more preferably at least ten times higher, than in preferably the same cells, tissues or bodily fluid of a normal human control. In contrast, if low expression relative to a control of a ESNA or ESP is indicative of a noncancerous endometrial disease, a diagnostic assay is considered positive if the level of expression of the ESNA or ESP is at least two times lower, more preferably are at least five times lower, even more preferably at least ten times lower than in preferably the same cells, tissues or bodily fluid of a normal human control. The normal human control may be from a different patient or from uninvolved tissue of the same patient.

[0346] One having ordinary skill in the art may determine whether a ESNA and/or ESP is associated with a particular noncancerous endometrial disease by obtaining endometrial tissue from a patient having a noncancerous endometrial disease of interest and determining which ESNAs and/or ESPs are expressed in the tissue at either a higher or a lower level than in normal endometrial tissue. In another embodiment, one may determine whether a ESNA or ESP exhibits structural alterations in a particular noncancerous endometrial disease state by obtaining endometrial tissue from a patient having a noncancerous endometrial disease of interest and determining the structural alterations in one or more ESNAs and/or ESPs relative to normal endometrial tissue.

Methods for Identifying Endometrial Tissue

[0347] In another aspect, the invention provides methods for identifying endometrial tissue. These methods are particularly useful in, e.g., forensic science, endometrial cell differentiation and development, and in tissue engineering.

[0348] In one embodiment, the invention provides a method for determining whether a sample is endometrial tissue or has endometrial tissue-like characteristics. The method comprises the steps of providing a sample suspected of comprising endometrial tissue or having endometrial tissue-like characteristics, determining whether the sample expresses one or more ESNAs and/or ESPs, and, if the sample expresses one or more ESNAs and/or ESPs, concluding that the sample comprises endometrial tissue. In a preferred embodiment, the ESNA encodes a polypeptide having an amino acid sequence selected from SEQ ID NO: 473-666, or a homolog, allelic variant or fragment thereof. In a more preferred embodiment, the ESNA has a nucleotide sequence selected from SEQ ID NO: 1-472, or a hybridizing nucleic acid, an allelic variant or a part thereof. Determining whether a sample expresses a ESNA can be accomplished by any method known in the art. Preferred methods include hybridization to microarrays, Northern blot hybridization, and quantitative or qualitative RT-PCR. In another preferred embodiment, the method can be practiced by determining whether a ESP is expressed. Determining whether a sample expresses a ESP can be accomplished by any method known in the art. Preferred methods include Western blot, ELISA, RIA and 2D PAGE. In one embodiment, the ESP has an amino acid sequence selected from SEQ ID NO: 473-666, or a homolog, allelic variant or fragment thereof. In another preferred embodiment, the expression of at least two ESNAs and/or ESPs is determined. In a more preferred embodiment, the expression of at least three, more preferably four and even more preferably five ESNAs and/or ESPs are determined.

[0349] In one embodiment, the method can be used to determine whether an unknown tissue is endometrial tissue. This is particularly useful in forensic science, in which small, damaged pieces of tissues that are not identifiable by microscopic or other means are recovered from a crime or accident scene. In another embodiment, the method can be used to determine whether a tissue is differentiating or developing into endometrial tissue. This is important in monitoring the effects of the addition of various agents to cell or tissue culture, e.g., in producing new endometrial tissue by tissue engineering. These agents include, e.g., growth and differentiation factors, extracellular matrix proteins and culture medium. Other factors that may be measured for effects on tissue development and differentiation include gene transfer into the cells or tissues, alterations in pH, aqueous:air interface and various other culture conditions.

Methods for Producing and Modifying Endometrial Tissue

[0350] In another aspect, the invention provides methods for producing engineered endometrial tissue or cells. In one embodiment, the method comprises the steps of providing cells, introducing a ESNA or a ESG into the cells, and growing the cells under conditions in which they exhibit one or more properties of endometrial tissue cells. In a preferred embodiment, the cells are pleuripotent. As is well known in the art, normal endometrial tissue comprises a large number of different cell types. Thus, in one embodiment, the engineered endometrial tissue or cells comprises one of these cell types. In another embodiment, the engineered endometrial tissue or cells comprises more than one endometrial cell type. Further, the culture conditions of the cells or tissue may require manipulation in order to achieve full differentiation and development of the endometrial cell tissue. Methods for manipulating culture conditions are well known in the art.

[0351] Nucleic acid molecules encoding one or more ESPs are introduced into cells, preferably pleuripotent cells. In a preferred embodiment, the nucleic acid molecules encode ESPs having amino acid sequences selected from SEQ ID NO: 473-666, or homologous proteins, analogs, allelic variants or fragments thereof. In a more preferred embodiment, the nucleic acid molecules have a nucleotide sequence selected from SEQ ID NO: 1-472, or hybridizing nucleic acids, allelic variants or parts thereof. In another highly preferred embodiment, a ESG is introduced into the cells. Expression vectors and methods of introducing nucleic acid molecules into cells are well known in the art and are described in detail, supra.

[0352] Artificial endometrial tissue may be used to treat patients who have lost some or all of their endometrial function.

Pharmaceutical Compositions

[0353] In another aspect, the invention provides pharmaceutical compositions comprising the nucleic acid molecules, polypeptides, fusion proteins, antibodies, antibody derivatives, antibody fragments, agonists, antagonists, or inhibitors of the present invention. In a preferred embodiment, the pharmaceutical composition comprises a ESNA or part thereof. In a more preferred embodiment, the ESNA has a nucleotide sequence selected from the group consisting of SEQ ID NO: 1-472, a nucleic acid that hybridizes thereto, an allelic variant thereof, or a nucleic acid that has substantial sequence identity thereto. In another preferred embodiment, the pharmaceutical composition comprises a ESP or fragment thereof. In a more preferred embodiment, the pharmaceutical composition comprises a ESP having an amino acid sequence that is selected from the group consisting of SEQ ID NO: 473-666, a polypeptide that is homologous thereto, a fusion protein comprising all or a portion of the polypeptide, or an analog or derivative thereof. In another preferred embodiment, the pharmaceutical composition comprises an anti-ESP antibody, preferably an antibody that specifically binds to a ESP having an amino acid that is selected from the group consisting of SEQ ID NO: 473-666, or an antibody that binds to a polypeptide that is homologous thereto, a fusion protein comprising all or a portion of the polypeptide, or an analog or derivative thereof.

[0354] Such a composition typically contains from about 0.1 to 90% by weight of a therapeutic agent of the invention formulated in and/or with a pharmaceutically acceptable carrier or excipient.

[0355] Pharmaceutical formulation is a well-established art that is further described in Gennaro (ed.), Remington: The Science and Practice of Pharmacy, 20^{th} ed., Lippincott, Williams & Wilkins (2000); Ansel et al., Pharmaceutical Dosage Forms and Drug Delivery Systems, 7^{th} ed., Lippincott Williams & Wilkins (1999); and Kibbe (ed.), Handbook of Pharmaceutical Excipients American Pharmaceutical Association, 3^{rd} ed. (2000) and thus need not be described in detail herein.

[0356] Briefly, formulation of the pharmaceutical compositions of the present invention will depend upon the route chosen for administration. The pharmaceutical compositions utilized in this invention can be administered by various routes including both enteral and parenteral routes, including oral, intravenous, intramuscular, subcutaneous, inhalation, topical, sublingual, rectal, intra-arterial, intramedullary, intrathecal, intraventricular, transmucosal, transdermal, intranasal, intraperitoneal, intrapulmonary, and intrauterine.

[0357] Oral dosage forms can be formulated as tablets, pills, dragees, capsules, liquids, gels, syrups, slurries, suspensions, and the like, for ingestion by the patient.

[0358] Solid formulations of the compositions for oral administration can contain suitable carriers or excipients, such as carbohydrate or protein fillers, such as sugars, including lactose, sucrose, mannitol, or sorbitol; starch from corn, wheat, rice, potato, or other plants; cellulose, such as methyl cellulose, hydroxypropylmethyl-cellulose, sodium carboxymethylcellulose, or microcrystalline cellulose; gums including arabic and tragacanth; proteins such as gelatin and collagen; inorganics, such as kaolin, calcium carbonate, dicalcium phosphate, sodium chloride; and other agents such as acacia and alginic acid.

[0359] Agents that facilitate disintegration and/or solubilization can be added, such as the cross-linked polyvinyl pyrrolidone, agar, alginic acid, or a salt thereof, such as sodium alginate, microcrystalline cellulose, cornstarch, sodium starch glycolate, and alginic acid.

[0360] Tablet binders that can be used include acacia, methylcellulose, sodium carboxymethylcellulose, polyvinylpyrrolidone (Povidone™), hydroxypropyl methylcellulose, sucrose, starch and ethylcellulose.

[0361] Lubricants that can be used include magnesium stearates, stearic acid, silicone fluid, talc, waxes, oils, and colloidal silica.

[0362] Fillers, agents that facilitate disintegration and/or solubilization, tablet binders and lubricants, including the aforementioned, can be used singly or in combination.

[0363] Solid oral dosage forms need not be uniform throughout. For example, dragee cores can be used in conjunction with suitable coatings, such as concentrated sugar solutions, which can also contain gum arabic, talc, polyvinylpyrrolidone, carbopol gel, polyethylene glycol, and/or titanium dioxide, lacquer solutions, and suitable organic solvents or solvent mixtures.

[0364] Oral dosage forms of the present invention include push-fit capsules made of gelatin, as well as soft, sealed capsules made of gelatin and a coating, such as glycerol or sorbitol. Push-fit capsules can contain active ingredients mixed with a filler or binders, such as lactose or starches, lubricants, such as talc or magnesium stearate, and, optionally, stabilizers. In soft capsules, the active compounds can be dissolved or suspended in suitable liquids, such as fatty oils, liquid, or liquid polyethylene glycol with or without stabilizers.

[0365] Additionally, dyestuffs or pigments can be added to the tablets or dragee coatings for product identification or to characterize the quantity of active compound, i.e., dosage.

[0366] Liquid formulations of the pharmaceutical compositions for oral (enteral) administration are prepared in water or other aqueous vehicles and can contain various suspending agents such as methylcellulose, alginates, tragacanth, pectin, kelgin, carrageenan, acacia, polyvinylpyrrolidone, and polyvinyl alcohol. The liquid formulations can also include solutions, emulsions, syrups and elixirs containing, together with the active compound(s), wetting agents, sweeteners, and coloring and flavoring agents.

[0367] The pharmaceutical compositions of the present invention can also be formulated for parenteral administration. Formulations for parenteral administration can be in the form of aqueous or non-aqueous isotonic sterile injection solutions or suspensions.

[0368] For intravenous injection, water soluble versions of the compounds of the present invention are formulated in, or if provided as a lyophilate, mixed with, a physiologically acceptable fluid vehicle, such as 5% dextrose (“D5”), physiologically buffered saline, 0.9% saline, Hanks' solution, or Ringer's solution. Intravenous formulations may include carriers, excipients or stabilizers including, without limitation, calcium, human serum albumin, citrate, acetate, calcium chloride, carbonate, and other salts.

[0369] Intramuscular preparations, e.g. a sterile formulation of a suitable soluble salt form of the compounds of the present invention, can be dissolved and administered in a pharmaceutical excipient such as Water-for-Injection, 0.9% saline, or 5% glucose solution. Alternatively, a suitable insoluble form of the compound can be prepared and administered as a suspension in an aqueous base or a pharmaceutically acceptable oil base, such as an ester of a long chain fatty acid (e.g., ethyl oleate), fatty oils such as sesame oil, triglycerides, or liposomes.

[0370] Parenteral formulations of the compositions can contain various carriers such as vegetable oils, dimethylacetamide, dimethylformamide, ethyl lactate, ethyl carbonate, isopropyl myristate, ethanol, polyols (glycerol, propylene glycol, liquid polyethylene glycol, and the like).

[0371] Aqueous injection suspensions can also contain substances that increase the viscosity of the suspension, such as sodium carboxymethyl cellulose, sorbitol, or dextran. Non-lipid polycationic amino polymers can also be used for delivery. Optionally, the suspension can also contain suitable stabilizers or agents that increase the solubility of the compounds to allow for the preparation of highly concentrated solutions.

[0372] Pharmaceutical compositions of the present invention can also be formulated to permit injectable, long-term, deposition. Injectable depot forms may be made by forming microencapsulated matrices of the compound in biodegradable polymers such as polylactide-polyglycolide. Depending upon the ratio of drug to polymer and the nature of the particular polymer employed, the rate of drug release can be controlled. Examples of other biodegradable polymers include poly(orthoesters) and poly(anhydrides). Depot injectable formulations are also prepared by entrapping the drug in microemulsions that are compatible with body tissues.

[0373] The pharmaceutical compositions of the present invention can be administered topically. For topical use the compounds of the present invention can also be prepared in suitable forms to be applied to the skin, or mucus membranes of the nose and throat, and can take the form of lotions, creams, ointments, liquid sprays or inhalants, drops, tinctures, lozenges, or throat paints. Such topical formulations further can include chemical compounds such as dimethylsulfoxide (DMSO) to facilitate surface penetration of the active ingredient. In other transdermal formulations, typically in patch-delivered formulations, the pharmaceutically active compound is formulated with one or more skin penetrants, such as 2-N-methyl-pyrrolidone (NMP) or Azone. A topical semi-solid ointment formulation typically contains a concentration of the active ingredient from about 1 to 20%, e.g., 5 to 10%, in a carrier such as a pharmaceutical cream base.

[0374] For application to the eyes or ears, the compounds of the present invention can be presented in liquid or semi-liquid form formulated in hydrophobic or hydrophilic bases as ointments, creams, lotions, paints or powders.

[0375] For rectal administration the compounds of the present invention can be administered in the form of suppositories admixed with conventional carriers such as cocoa butter, wax or other glyceride.

[0376] Inhalation formulations can also readily be formulated. For inhalation, various powder and liquid formulations can be prepared. For aerosol preparations, a sterile formulation of the compound or salt form of the compound may be used in inhalers, such as metered dose inhalers, and nebulizers. Aerosolized forms may be especially useful for treating respiratory disorders.

[0377] Alternatively, the compounds of the present invention can be in powder form for reconstitution in the appropriate pharmaceutically acceptable carrier at the time of delivery.

[0378] The pharmaceutically active compound in the pharmaceutical compositions of the present invention can be provided as the salt of a variety of acids, including but not limited to hydrochloric, sulfuric, acetic, lactic, tartaric, malic, and succinic acid. Salts tend to be more soluble in aqueous or other protonic solvents than are the corresponding free base forms.

[0379] After pharmaceutical compositions have been prepared, they are packaged in an appropriate container and labeled for treatment of an indicated condition.

[0380] The active compound will be present in an amount effective to achieve the intended purpose. The determination of an effective dose is well within the capability of those skilled in the art.

[0381] A “therapeutically effective dose” refers to that amount of active ingredient, for example ESP polypeptide, fusion protein, or fragments thereof, antibodies specific for ESP, agonists, antagonists or inhibitors of ESP, which ameliorates the signs or symptoms of the disease or prevent progression thereof; as would be understood in the medical arts, cure, although desired, is not required.

[0382] The therapeutically effective dose of the pharmaceutical agents of the present invention can be estimated initially by in vitro tests, such as cell culture assays, followed by assay in model animals, usually mice, rats, rabbits, dogs, or pigs. The animal model can also be used to determine an initial preferred concentration range and route of administration.

[0383] For example, the ED50 (the dose therapeutically effective in 50% of the population) and LD50 (the dose lethal to 50% of the population) can be determined in one or more cell culture of animal model systems. The dose ratio of toxic to therapeutic effects is the therapeutic index, which can be expressed as LD50/ED50. Pharmaceutical compositions that exhibit large therapeutic indices are preferred.

[0384] The data obtained from cell culture assays and animal studies are used in formulating an initial dosage range for human use, and preferably provide a range of circulating concentrations that includes the ED50 with little or no toxicity. After administration, or between successive administrations, the circulating concentration of active agent varies within this range depending upon pharmacokinetic factors well known in the art, such as the dosage form employed, sensitivity of the patient, and the route of administration.

[0385] The exact dosage will be determined by the practitioner, in light of factors specific to the subject requiring treatment. Factors that can be taken into account by the practitioner include the severity of the disease state, general health of the subject, age, weight, gender of the subject, diet, time and frequency of administration, drug combination(s), reaction sensitivities, and tolerance/response to therapy. Long-acting pharmaceutical compositions can be administered every 3 to 4 days, every week, or once every two weeks depending on half-life and clearance rate of the particular formulation.

[0386] Normal dosage amounts may vary from 0.1 to 100,000 micrograms, up to a total dose of about 1 g, depending upon the route of administration. Where the therapeutic agent is a protein or antibody of the present invention, the therapeutic protein or antibody agent typically is administered at a daily dosage of 0.01 mg to 30 mg/kg of body weight of the patient (e.g., 1 mg/kg to 5 mg/kg). The pharmaceutical formulation can be administered in multiple doses per day, if desired, to achieve the total desired daily dose.

[0387] Guidance as to particular dosages and methods of delivery is provided in the literature and generally available to practitioners in the art. Those skilled in the art will employ different formulations for nucleotides than for proteins or their inhibitors. Similarly, delivery of polynucleotides or polypeptides will be specific to particular cells, conditions, locations, etc.

[0388] Conventional methods, known to those of ordinary skill in the art of medicine, can be used to administer the pharmaceutical formulation(s) of the present invention to the patient. The pharmaceutical compositions of the present invention can be administered alone, or in combination with other therapeutic agents or interventions.

Therapeutic Methods

[0389] The present invention further provides methods of treating subjects having defects in a gene of the invention, e.g., in expression, activity, distribution, localization, and/or solubility, which can manifest as a disorder of endometrial function. As used herein, “treating” includes all medically-acceptable types of therapeutic intervention, including palliation and prophylaxis (prevention) of disease. The term “treating” encompasses any improvement of a disease, including minor improvements. These methods are discussed below.

[0390] Gene Therapy and Vaccines

[0391] The isolated nucleic acids of the present invention can also be used to drive in vivo expression of the polypeptides of the present invention. In vivo expression can be driven from a vector, typically a viral vector, often a vector based upon a replication incompetent retrovirus, an adenovirus, or an adeno-associated virus (AAV), for the purpose of gene therapy. In vivo expression can also be driven from signals endogenous to the nucleic acid or from a vector, often a plasmid vector, such as pVAX1 (Invitrogen, Carlsbad, Calif., USA), for purpose of “naked” nucleic acid vaccination, as further described in U.S. Pat. Nos. 5,589,466; 5,679,647; 5,804,566; 5,830,877; 5,843,913; 5,880,104; 5,958,891; 5,985,847; 6,017,897; 6,110,898; 6,204,250, the disclosures of which are incorporated herein by reference in their entireties. For cancer therapy, it is preferred that the vector also be tumor-selective. See, e.g., Doronin et al., J. Virol. 75: 3314-24 (2001).

[0392] In another embodiment of the therapeutic methods of the present invention, a therapeutically effective amount of a pharmaceutical composition comprising a nucleic acid molecule of the present invention is administered. The nucleic acid molecule can be delivered in a vector that drives expression of a ESP, fusion protein, or fragment thereof, or without such vector. Nucleic acid compositions that can drive expression of a ESP are administered, for example, to complement a deficiency in the native ESP, or as DNA vaccines. Expression vectors derived from virus, replication deficient retroviruses, adenovirus, adeno-associated (AAV) virus, herpes virus, or vaccinia virus can be used as can plasmids. See, e.g., Cid-Arregui, supra. In a preferred embodiment, the nucleic acid molecule encodes a ESP having the amino acid sequence of SEQ ID NO: 473-666, or a fragment, fusion protein, allelic variant or homolog thereof.

[0393] In still other therapeutic methods of the present invention, pharmaceutical compositions comprising host cells that express a ESP, fusions, or fragments thereof can be administered. In such cases, the cells are typically autologous, so as to circumvent xenogeneic or allotypic rejection, and are administered to complement defects in ESP production or activity. In a preferred embodiment, the nucleic acid molecules in the cells encode a ESP having the amino acid sequence of SEQ ID NO: 473-666, or a fragment, fusion protein, allelic variant or homolog thereof.

[0394] Antisense Administration

[0395] Antisense nucleic acid compositions, or vectors that drive expression of a ESG antisense nucleic acid, are administered to downregulate transcription and/or translation of a ESG in circumstances in which excessive production, or production of aberrant protein, is the pathophysiologic basis of disease.

[0396] Antisense compositions useful in therapy can have a sequence that is complementary to coding or to noncoding regions of a ESG. For example, oligonucleotides derived from the transcription initiation site, e.g., between positions −10 and +10 from the start site, are preferred.

[0397] Catalytic antisense compositions, such as ribozymes, that are capable of sequence-specific hybridization to ESG transcripts, are also useful in therapy. See, e.g., Phylactou, Adv. Drug Deliv. Rev. 44(2-3): 97-108 (2000); Phylactou et al., Hum. Mol. Genet. 7(10): 1649-53 (1998); Rossi, Ciba Found. Symp. 209: 195-204 (1997); and Sigurdsson et al., Trends Biotechnol. 13(8): 286-9 (1995).

[0398] Other nucleic acids useful in the therapeutic methods of the present invention are those that are capable of triplex helix formation in or near the ESG genomic locus. Such triplexing oligonucleotides are able to inhibit transcription. See, e.g., Intody et al., Nucleic Acids Res. 28(21): 4283-90 (2000); and McGuffie et al., Cancer Res. 60(14): 3790-9 (2000). Pharmaceutical compositions comprising such triplex forming oligos (TFOs) are administered in circumstances in which excessive production, or production of aberrant protein, is a pathophysiologic basis of disease.

[0399] In a preferred embodiment, the antisense molecule is derived from a nucleic acid molecule encoding a ESP, preferably a ESP comprising an amino acid sequence of SEQ ID NO: 473-666, or a fragment, allelic variant or homolog thereof. In a more preferred embodiment, the antisense molecule is derived from a nucleic acid molecule having a nucleotide sequence of SEQ ID NO: 1-472, or a part, allelic variant, substantially similar or hybridizing nucleic acid thereof.

[0400] Polypeptide Administration

[0401] In one embodiment of the therapeutic methods of the present invention, a therapeutically effective amount of a pharmaceutical composition comprising a ESP, a fusion protein, fragment, analog or derivative thereof is administered to a subject with a clinically-significant ESP defect.

[0402] Protein compositions are administered, for example, to complement a deficiency in native ESP. In other embodiments, protein compositions are administered as a vaccine to elicit a humoral and/or cellular immune response to ESP. The immune response can be used to modulate activity of ESP or, depending on the immunogen, to immunize against aberrant or aberrantly expressed forms, such as mutant or inappropriately expressed isoforms. In yet other embodiments, protein fusions having a toxic moiety are administered to ablate cells that aberrantly accumulate ESP.

[0403] In a preferred embodiment, the polypeptide administered is a ESP comprising an amino acid sequence of SEQ ID NO: 473-666, or a fusion protein, allelic variant, homolog, analog or derivative thereof. In a more preferred embodiment, the polypeptide is encoded by a nucleic acid molecule having a nucleotide sequence of SEQ ID NO: 1-472, or a part, allelic variant, substantially similar or hybridizing nucleic acid thereof.

[0404] Antibody, Agonist and Antagonist Administration

[0405] In another embodiment of the therapeutic methods of the present invention, a therapeutically effective amount of a pharmaceutical composition comprising an antibody (including fragment or derivative thereof) of the present invention is administered. As is well known, antibody compositions are administered, for example, to antagonize activity of ESP, or to target therapeutic agents to sites of ESP presence and/or accumulation. In a preferred embodiment, the antibody specifically binds to a ESP comprising an amino acid sequence of SEQ ID NO: 473-666, or a fusion protein, allelic variant, homolog, analog or derivative thereof. In a more preferred embodiment, the antibody specifically binds to a ESP encoded by a nucleic acid molecule having a nucleotide sequence of SEQ ID NO: 1-472, or a part, allelic variant, substantially similar or hybridizing nucleic acid thereof.

[0406] The present invention also provides methods for identifying modulators which bind to a ESP or have a modulatory effect on the expression or activity of a ESP. Modulators which decrease the expression or activity of ESP (antagonists) are believed to be useful in treating endometrial cancer. Such screening assays are known to those of skill in the art and include, without limitation, cell-based assays and cell-free assays. Small molecules predicted via computer imaging to specifically bind to regions of a ESP can also be designed, synthesized and tested for use in the imaging and treatment of endometrial cancer. Further, libraries of molecules can be screened for potential anticancer agents by assessing the ability of the molecule to bind to the ESPs identified herein. Molecules identified in the library as being capable of binding to a ESP are key candidates for further evaluation for use in the treatment of endometrial cancer. In a preferred embodiment, these molecules will downregulate expression and/or activity of a ESP in cells.

[0407] In another embodiment of the therapeutic methods of the present invention, a pharmaceutical composition comprising a non-antibody antagonist of ESP is administered. Antagonists of ESP can be produced using methods generally known in the art. In particular, purified ESP can be used to screen libraries of pharmaceutical agents, often combinatorial libraries of small molecules, to identify those that specifically bind and antagonize at least one activity of a ESP.

[0408] In other embodiments a pharmaceutical composition comprising an agonist of a ESP is administered. Agonists can be identified using methods analogous to those used to identify antagonists.

[0409] In a preferred embodiment, the antagonist or agonist specifically binds to and antagonizes or agonizes, respectively, a ESP comprising an amino acid sequence of SEQ ID NO: 473-666, or a fusion protein, allelic variant, homolog, analog or derivative thereof. In a more preferred embodiment, the antagonist or agonist specifically binds to and antagonizes or agonizes, respectively, a ESP encoded by a nucleic acid molecule having a nucleotide sequence of SEQ ID NO: 1-472, or a part, allelic variant, substantially similar or hybridizing nucleic acid thereof.

[0410] Targeting Endometrial Tissue

[0411] The invention also provides a method in which a polypeptide of the invention, or an antibody thereto, is linked to a therapeutic agent such that it can be delivered to the endometrial or to specific cells in the endometrial. In a preferred embodiment, an anti-ESP antibody is linked to a therapeutic agent and is administered to a patient in need of such therapeutic agent. The therapeutic agent may be a toxin, if endometrial tissue needs to be selectively destroyed. This would be useful for targeting and killing endometrial cancer cells. In another embodiment, the therapeutic agent may be a growth or differentiation factor, which would be useful for promoting endometrial cell function.

[0412] In another embodiment, an anti-ESP antibody may be linked to an imaging agent that can be detected using, e.g., magnetic resonance imaging, CT or PET. This would be useful for determining and monitoring endometrial function, identifying endometrial cancer tumors, and identifying noncancerous endometrial diseases.

### EXAMPLES

### Example 1

### Gene Expression Analysis

[0413] Custom CLASP Experiment

[0414] ESGs were identified by a systematic analysis of gene expression data in the LIFESEQ® Gold database available from Incyte Genomics Inc (Palo Alto, Calif.) using the data mining software package CLASP™ (Candidate Lead Automatic Search Program). CLASP™ is a set of algorithms that interrogate Incyte's database to identify genes that are both specific to particular tissue types as well as differentially expressed in tissues from patients with cancer. LifeSeq® Gold contains information about which genes are expressed in various tissues in the body and about the dynamics of expression in both normal and diseased states. CLASP™ first sorts the LifeSeq® Gold database into defined tissue types, such as breast, ovary and prostate. CLASP™ categorizes each tissue sample by disease state. Disease states include “healthy,” “cancer,” “associated with cancer,” “other disease” and “other.” Categorizing the disease states improves our ability to identify tissue and cancer-specific molecular targets. CLASP™ then performs a simultaneous parallel search for genes that are expressed both (1) selectively in the defined tissue type compared to other tissue types and (2) differentially in the “cancer” disease state compared to the other disease states affecting the same, or different, tissues. This sorting is accomplished by using mathematical and statistical filters that specify the minimum change in expression levels and the minimum frequency that the differential expression pattern must be observed across the tissue samples for the gene to be considered statistically significant. The CLASP™ algorithm quantifies the relative abundance of a particular gene in each tissue type and in each disease state.

[0415] To find the ESGs of this invention, the following specific CLASP™ profiles were utilized: tissue-specific expression (CLASP 1), detectable expression only in cancer tissue (CLASP 2), maximal expression in cancer (CLASP 4) and differential expression in cancer tissue (CLASP 5). cDNA libraries were divided into 60 unique tissue types (early versions of LifeSeq® had 48 tissue types). Genes or ESTs were grouped into “gene bins,” where each bin is a cluster of sequences grouped together where they share a common contig. The expression level for each gene bin was calculated for each tissue type. Differential expression significance was calculated with rigorous statistical significant testing taking into account variations in sample size and relative gene abundance in different libraries and within each library (for the equations used to determine statistically significant expression see Audic and Claverie “The significance of digital gene expression profiles,” Genome Res 7(10): 986-995 (1997), including Equation 1 on page 987 and Equation 2 on page 988, the contents of which are incorporated by reference). Differentially expressed tissue-specific genes were selected based on the percentage abundance level in the targeted tissue versus all the other tissues (tissue-specificity). The expression levels for each gene in libraries of normal tissues or non-tumor tissues from cancer patients were compared with the expression levels in tissue libraries associated with tumor or disease (cancer-specificity). The results were analyzed for statistical significance.

[0416] The selection of the target genes meeting the rigorous CLASP™ profile criteria were as follows:
[0417] (a) CLASP 1: tissue-specific expression: To qualify as a CLASP 1 candidate, a gene must exhibit statistically significant expression in the tissue of interest compared to all other tissues. Only if the gene exhibits such differential expression with a 90% of confidence level is it selected as a CLASP 1 candidate.
[0418] (b) CLASP 2: detectable expression only in cancer tissue: To qualify as a CLASP 2 candidate, a gene must exhibit detectable expression in tumor tissues and undetectable expression in libraries from normal individuals and libraries from normal tissue obtained from diseased patients. In addition, such a gene must also exhibit further specificity for the tumor tissues of interest.
[0419] (c) CLASP 4: maximum differential expression in cancer: To qualify as a CLASP 4 candidate, the lead must exhibit be one of the top 50 genes showing maximal differential expression in cancer tissues. In addition, such a gene must also exhibit further specificity for the tumor tissues of interest.
[0420] (d) CLASP 5: differential expression in cancer tissue: To qualify as a CLASP 5 candidate, a gene must be differentially expressed in tumor libraries in the tissue of interest compared to normal libraries for all tissues. Only if the gene exhibits such differential expression with a 90% of confidence level is it selected as a CLASP 5 candidate.
   The CLASP scores for SEQ ID NO: 1-472 are listed below:

[0421] Expression data is not presented for many specific splice variants, however at least one transcript for the splice variant family is supported by expression data shown in the table. Splice variants may share similar regions among various transcripts and therefore data for one variant may be relevant to another. This supporting data is available on request. There are 2 values for each organ in the format 9-0.9999. The first represent the number of occurrences of the gene in the given organ. The 2nd number represents the percentage of the expression of the gene in the given organ.

| DEX0377_1.nt.1 | SEQID | CLASP2 | UTR | | | | |
|---|---|---|---|---|---|---|---|
| | NO. 1 | | .0157 | | | | |
| DEX0377_1.nt.2 | SEQID | CLASP2 | UTR | | | | |
| | NO. 2 | | .0157 | | | | |
| DEX0377_2.nt.1 | SEQID | CLASP1 | UTR | | | | |
| | NO. 4 | | .0011 | | | | |
| DEX0377_3.nt.1 | SEQID | CLASP5 | | PNS | OVR | LIV | |
| | NO. 6 | | | .0023 | .0082 | .0094 | |
| DEX0377_3.nt.2 | SEQID | CLASP5 | | PNS | OVR | LIV | |
| | NO. 7 | | | .0023 | .0082 | .0094 | |
| DEX0377_4.nt.1 | SEQID | CLASP5 | UTR | FTS | MAM | PAN | KID |
| | NO. 49 | CLASP3 | .0038 | .0003 | .0005 | .0012 | .0013 |
| DEX0377_4.nt.2 | SEQID | CLASP5 | UTR | FTS | MAM | PAN | KID |
| | NO. 50 | CLASP3 | .0038 | .0003 | .0005 | .0012 | .0013 |
| DEX0377_5.nt.1 | SEQID | CLASP1 | UTR | BRN | UNC | | |
| | NO. 58 | | .0011 | .0004 | .0011 | | |
| DEX0377_6.nt.1 | SEQID | CLASP2 | UTR | | | | |
| | NO. 60 | | .003 | | | | |
| DEX0377_7.nt.1 | SEQID | CLASP2 | UTR | | | | |
| | NO. 62 | | .0083 | | | | |
| DEX0377_7.nt.2 | SEQID | CLASP2 | UTR | | | | |
| | NO. 63 | | .0083 | | | | |
| DEX0377_8.nt.1 | SEQID | CLASP2 | UTR | | | | |
| | NO. 65 | | .003 | | | | |
| DEX0377_9.nt.1 | SEQID | CLASP2 | UTR | | | | |
| | NO. 87 | | .003 | | | | |
| DEX0377_10.nt.1 | SEQID | CLASP1 | UTR | LNG | BRN | | |
| | NO. 89 | | .0014 | .0003 | .0004 | | |
| DEX0377_10.nt.2 | SEQID | CLASP1 | UTR | LNG | BRN | | |
| | NO. 90 | | .0014 | .0003 | .0004 | | |
| DEX0377_11.nt.1 | SEQID | CLASP5 | UTR | FTS | ADR | ADR | UNC |
| | NO. 92 | CLASP1 | .0011 | .0001 | .0013 | .0015 | .0022 |
| DEX0377_11.nt.2 | SEQID | CLASP5 | UTR | FTS | ADR | ADR | UNC |
| | NO. 93 | CLASP1 | .0011 | .0001 | .0013 | .0015 | .0022 |
| DEX0377_12.nt.1 | SEQID | CLASP5 | UTR | FTS | BLD | BLD | |
| | NO. 124 | CLASP1 | .0011 | .0001 | .0016 | .0016 | |
| DEX0377_13.nt .1 | SEQID | CLASP5 | UTR | BRN | LNG | BLO | FTS |
| | NO. 127 | CLASP1 | .0019 | .0001 | .0003 | .0003 | .0003 |
| DEX0377_14.nt.1 | SEQID | CLASP2 | UTR | | | | |
| | NO. 128 | | .003 | | | | |
| DEX0377_15.nt.1 | SEQID | CLASP2 | UTR | ADR | | | |
| | NO. 130 | | .003 | .0014 | | | |
| DEX0377_16.nt.1 | SEQID | CLASP1 | UTR | STO | PNS | NOS | |
| | NO. 132 | | .0018 | .0021 | .0022 | .0057 | |
| DEX0377_16.nt.2 | SEQID | CLASP1 | UTR | STO | PNS | NOS | |
| | NO. 133 | | .0018 | .0021 | .0022 | .0057 | |
| DEX0377_17.nt.1 | SEQID | CLASP2 | UTR | | | | |
| | NO. 137 | | .003 | | | | |
| DEX0377_18.nt.1 | SEQID | CLASP1 | UTR | FTS | BRN | BLV | BLO |
| | NO. 138 | | .0011 | .0004 | .0006 | .0006 | .0009 |
| DEX0377_18.nt.2 | SEQID | CLASP1 | UTR | FTS | BRN | BLV | BLO |
| | NO. 139 | | .0011 | .0004 | .0006 | .0006 | .0009 |
| DEX0377_19.nt.1 | SEQID | CLASP5 | UTR | LNG | | | |
| | NO. 140 | CLASP1 | .0019 | .0003 | | | |
| DEX0377_20.nt.1 | SEQID | CLASP1 | UTR | FTS | INL | PRO | BLD |
| | NO. 143 | | .0011 | .0001 | .0004 | .001 | .0016 |
| DEX0377_21.nt.1 | SEQID | CLASP1 | UTR | PRO | MAM | BLV | FTS |
| | NO. 163 | | .0011 | .0003 | .0004 | .0006 | .0009 |
| DEX0377_21.nt.2 | SEQID | CLASP1 | UTR | PRO | MAM | BLV | FTS |
| | NO. 164 | | .0011 | .0003 | .0004 | .0006 | .0009 |
| DEX0377_21.nt.3 | SEQID | CLASP1 | UTR | PRO | MAM | BLV | FTS |
| | NO. 165 | | .0011 | .0003 | .0004 | .0006 | .0009 |
| DEX0377_22.nt.1 | SEQID | CLASP1 | UTR | BLV | | | |
| | NO. 168 | | .0018 | .0006 | | | |
| DEX0377_23.nt.1 | SEQID | CLASP1 | UTR | | | | |
| | NO. 170 | | .0011 | | | | |
| DEX0377_24.nt.1 | SEQID | CLASP5 | UTR | LNG | PRO | CON | CON |
| | NO. 172 | CLASP1 | .0011 | .0003 | .0003 | .0007 | .0011 |
| DEX0377_24.nt.2 | SEQID | CLASP5 | UTR | LNG | PRO | CON | CON |
| | NO. 173 | CLASP1 | .0011 | .0003 | .0003 | .0007 | .0011 |
| DEX0377_25.nt.1 | SEQID | CLASP2 | UTR | | | | |
| | NO. 175 | | .003 | | | | |
| DEX0377_26.nt.1 | SEQID | CLASP2 | UTR | | | | |
| | NO. 177 | | .003 | | | | |
| DEX0377_26.nt.2 | SEQID | CLASP2 | UTR | | | | |
| | NO. 178 | | .003 | | | | |
| DEX0377_27.nt.1 | SEQID | CLASP1 | UTR | | | | |
| | NO. 188 | | .0011 | | | | |
| DEX0377_28.nt.1 | SEQID | CLASP1 | UTR | BRN | FTS | BMR | |
| | NO. 190 | | .0011 | .0001 | .0003 | .0015 | |
| DEX0377_28.nt.2 | SEQID | CLASP1 | UTR | BRN | FTS | BMR | |
| | NO. 191 | | .0011 | .0001 | .0003 | .0015 | |
| DEX0377_29.nt.1 | SEQID | CLASP2 | UTR | | | | |
| | NO. 193 | CLASP1 | .0229 | | | | |
| | | CLASP4 | | | | | |
| DEX0377_29.nt.2 | SEQID | CLASP2 | UTR | | | | |
| | NO. 194 | CLASP1 | .0229 | | | | |
| | | CLASP4 | | | | | |
| DEX0377_30.nt.1 | SEQID | CLASP1 | UTR | FTS | NRV | | |
| | NO. 196 | | .0011 | .0001 | .0008 | | |
| DEX0377_30.nt.2 | SEQID | CLASP1 | UTR | FTS | NRV | | |
| | NO. 197 | | .0011 | .0001 | .0008 | | |
| DEX0377_31.nt.1 | SEQID | CLASP1 | UTR | | | | |
| | NO. 199 | | .0011 | | | | |
| DEX0377_31.nt.2 | SEQID | CLASP1 | UTR | | | | |
| | NO. 200 | | .0011 | | | | |
| DEX0377_32.nt.1 | SEQID | CLASP2 | UTR | CON | | | |
| | NO. 202 | | .003 | .0013 | | | |
| DEX0377_33.nt.1 | SEQID | CLASP2 | UTR | | | | |
| | NO. 204 | | .0094 | | | | |
| DEX0377_34.nt.1 | SEQID | CLASP2 | UTR | | | | |
| | NO. 206 | | .0098 | | | | |
| DEX0377_35.nt.1 | SEQID | CLASP5 | UTR | FTS | BRN | MAM | |
| | NO. 211 | CLASP1 | .0019 | .0001 | .0004 | .0004 | |
| DEX0377_36.nt.1 | SEQID | CLASP2 | UTR | | | | |
| | NO. 221 | | .0115 | | | | |
| DEX0377_37.nt.1 | SEQID | CLASP1 | UTR | EYE | | | |
| | NO. 223 | | .0011 | .0062 | | | |
| DEX0377_38.nt.1 | SEQID | CLASP1 | UTR | FTS | | | |
| | NO. 226 | | .0011 | .0003 | | | |
| DEX0377_39.nt.1 | SEQID | CLASP2 | UTR | | | | |
| | NO. 228 | | .003 | | | | |
| DEX0377_39.nt.2 | SEQID | CLASP2 | UTR | | | | |
| | NO. 229 | | .003 | | | | |
| DEX0377_39.nt.3 | SEQID | CLASP2 | UTR | | | | |
| | NO. 230 | | .003 | | | | |
| DEX0377_40.nt.1 | SEQID | CLASP1 | UTR | | | | |
| | NO. 234 | | .0011 | | | | |
| DEX0377_41.nt.1 | SEQID | CLASP2 | UTR | LNG | | | |
| | NO. 236 | | .0098 | .0015 | | | |
| DEX0377_42.nt.1 | SEQID | CLASP5 | UTR | BRN | FTS | BLD | BLD |
| | NO. 257 | CLASP1 | .0014 | .0003 | .0003 | .0016 | .0016 |
| DEX0377_42.nt.2 | SEQID | CLASP5 | UTR | BRN | FTS | BLD | BLD |
| | NO. 258 | CLASP1 | .0014 | .0003 | .0003 | .0016 | .0016 |
| DEX0377_43.nt.1 | SEQID | CLASP2 | UTR | | | | |
| | NO. 261 | | .0098 | | | | |
| DEX0377_43.nt.2 | SEQID | CLASP2 | UTR | | | | |
| | NO. 262 | | .0098 | | | | |
| DEX0377_44.nt.1 | SEQID | CLASP2 | UTR | | | | |
| | NO. 269 | | .003 | | | | |
| DEX0377_45.nt.1 | SEQID | CLASP2 | UTR | | | | |
| | NO. 271 | | .0115 | | | | |
| DEX0377_46.nt.1 | SEQID | CLASP5 | UTR | PRO | BRN | INL | FTS |
| | NO. 273 | CLASP1 | .0044 | .0003 | .0004 | .0004 | .0006 |
| DEX0377_46.nt.2 | SEQID | CLASP5 | UTR | PRO | BRN | INL | FTS |
| | NO. 274 | CLASP1 | .0044 | .0003 | .0004 | .0004 | .0006 |
| DEX0377_46.nt.3 | SEQID | CLASP5 | UTR | PRO | BRN | INL | FTS |
| | NO. 275 | CLASP1 | .0044 | .0003 | .0004 | .0004 | .0006 |
| DEX0377_46.nt.4 | SEQID | CLASP5 | UTR | PRO | BRN | INL | FTS |
| | NO. 276 | CLASP1 | .0044 | .0003 | .0004 | .0004 | .0006 |
| DEX0377_47.nt.1 | SEQID | CLASP1 | UTR | FTS | INL | PRO | BLD |
| | NO. 290 | | .0011 | .0001 | .0004 | .001 | .0016 |
| DEX0377_48.nt.1 | SEQID | CLASP5 | UTR | INL | PRO | PRO | UNC |
| | NO. 292 | CLASP1 | .0011 | .0004 | .0007 | .0011 | .0011 |
| DEX0377_49.nt.1 | SEQID | CLASP5 | UTR | FTS | MAM | TNS | |
| | NO. 295 | CLASP1 | .0019 | .0001 | .0004 | .0016 | |
| DEX0377_49.nt.2 | SEQID | CLASP5 | UTR | FTS | MAM | TNS | |
| | NO. 296 | CLASP1 | .0019 | .0001 | .0004 | .0016 | |
| DEX0377_49.nt.3 | SEQID | CLASP5 | UTR | FTS | MAM | TNS | |
| | NO. 297 | CLASP1 | .0019 | .0001 | .0004 | .0016 | |
| DEX0377_50.nt.1 | SEQID | CLASP1 | UTR | FTS | | | |
| | NO. 310 | | .0018 | .0001 | | | |
| DEX0377_51.nt.1 | SEQID | CLASP2 | UTR | | | | |
| | NO. 312 | | .0083 | | | | |
| DEX0377_52.nt.1 | SEQID | CLASP1 | UTR | BRN | FTS | LNG | INL |
| | NO. 314 | | .0014 | .0001 | .0001 | .0003 | .0008 |
| DEX0377_53.nt.1 | SEQID | CLASP2 | UTR | PIB | | | |
| | NO. 316 | CLASP1 | .006 | .0045 | | | |
| | | CLASP4 | | | | | |
| DEX0377_53.nt.2 | SEQID | CLASP2 | UTR | PIB | | | |
| | NO. 317 | CLASP1 | .006 | .0045 | | | |
| | | CLASP4 | | | | | |
| DEX0377_54.nt.1 | SEQID | CLASP2 | UTR | | | | |
| | NO. 319 | | .003 | | | | |
| DEX0377_55.nt.1 | SEQID | CLASP1 | UTR | FTS | | | |
| | NO. 320 | | .0011 | .0001 | | | |
| DEX0377_56.nt.1 | SEQID | CLASP5 | UTR | FTS | | | |
| | NO. 322 | CLASP1 | .0025 | .0001 | | | |
| | | CLASP3 | | | | | |
| DEX0377_57.nt.1 | SEQID | CLASP2 | UTR | FTS | | | |
| | NO. 335 | | .003 | .0067 | | | |
| DEX0377_58.nt.1 | SEQID | CLASP1 | UTR | | | | |
| | NO. 338 | | .0011 | | | | |
| DEX0377_59.nt.1 | SEQID | CLASP1 | UTR | FTS | LNG | KID | OVR |
| | NO. 339 | | .0014 | .0001 | .0003 | .0006 | .0007 |
| DEX0377_59.nt.2 | SEQID | CLASP1 | UTR | FTS | LNG | KID | OVR |
| | NO. 340 | | .0014 | .0001 | .0003 | .0006 | .0007 |
| DEX0377_60.nt.1 | SEQID | CLASP5 | UTR | BRN | LNG | FTS | OVR |
| | NO. 342 | CLASP1 | .0038 | .0001 | .0003 | .0003 | .0013 |
| DEX0377_61.nt.1 | SEQID | CLASP5 | UTR | BLD | BLD | | |
| | NO. 344 | CLASP1 | .0022 | .0032 | .0032 | | |
| DEX0377_62.nt.1 | SEQID | CLASP1 | UTR | FTS | OVR | INS | UNC |
| | NO. 346 | | .0011 | .0001 | .0007 | .0009 | .0011 |
| DEX0377_62.nt.2 | SEQID | CLASP1 | UTR | FTS | OVR | INS | UNC |
| | NO. 347 | | .0011 | .0001 | .0007 | .0009 | .0011 |
| DEX0377_63.nt.1 | SEQID | CLASP2 | UTR | | | | |
| | NO. 349 | | .003 | | | | |
| DEX0377_64.nt.1 | SEQID | CLASP5 | UTR | LNG | | | |
| | NO. 351 | CLASP1 | .0019 | .0003 | | | |
| DEX0377_65.nt.1 | SEQID | CLASP5 | UTR | BRN | LNG | FTS | OVR |
| | NO.353 | CLASP1 | .0038 | .0001 | .0003 | .0003 | .0013 |
| DEX0377_66.nt.1 | SEQID | CLASP2 | UTR | | | | |
| | NO. 355 | | .003 | | | | |
| DEX0377_67.nt.1 | SEQID | CLASP5 | UTR | BRN | FTS | LNG | KID |
| | NO. 357 | CLASP1 | .0019 | .0001 | .0001 | .0003 | .0006 |
| DEX0377_68.nt.1 | SEQID | CLASP5 | UTR | PRO | | | |
| | NO. 359 | CLASP1 | .0019 | .0003 | | | |
| DEX0377_68.nt.2 | SEQID | CLASP5 | UTR | PRO | | | |
| | NO. 360 | CLASP1 | .0019 | .0003 | | | |
| DEX0377_69.nt.1 | SEQID | CLASP5 | UTR | PRO | INL | PRO | BLV |
| | NO. 363 | CLASP1 | .0019 | .0003 | .0004 | .0006 | .0006 |
| DEX0377_70.nt.1 | SEQID | CLASP5 | UTR | | | | |
| | NO. 366 | CLASP1 | .0031 | | | | |
| DEX0377_70.nt.2 | SEQID | CLASP5 | UTR | | | | |
| | NO. 367 | CLASP1 | .0031 | | | | |
| DEX0377_71.nt.1 | SEQID | CLASP1 | UTR | BLO | | | |
| | NO. 370 | | .0014 | .0003 | | | |
| DEX0377_72.nt.1 | SEQID | CLASP1 | UTR | | | | |
| | NO. 373 | | .0011 | | | | |
| DEX0377_73.nt.1 | SEQID | CLASP1 | UTR | | | | |
| | NO. 375 | | .0011 | | | | |
| DEX0377_74.nt.1 | SEQID | CLASP2 | UTR | LNG | | | |
| | NO. 378 | | .0115 | .0014 | | | |
| DEX0377_74.nt.2 | SEQID | CLASP2 | UTR | LNG | | | |
| | NO. 379 | | .0115 | .0014 | | | |
| DEX0377_75.nt.1 | SEQID | CLASP1 | UTR | | | | |
| | NO. 395 | | .0011 | | | | |
| DEX0377_76.nt.1 | SEQID | CLASP1 | UTR | | | | |
| | NO. 397 | | .0011 | | | | |
| DEX0377_77.nt.1 | SEQID | CLASP2 | UTR | PRO | ADR | | |
| | NO. 399 | | .003 | .0019 | .0028 | | |
| DEX0377_77.nt.2 | SEQID | CLASP2 | UTR | PRO | ADR | | |
| | NO. 400 | | .003 | .0019 | .0028 | | |
| DEX0377_77.nt.3 | SEQID | CLASP2 | UTR | PRO | ADR | | |
| | NO. 401 | | .003 | .0019 | .0028 | | |
| DEX0377_77.nt.4 | SEQID | CLASP2 | UTR | PRO | ADR | | |
| | NO. 402 | | .003 | .0019 | .0028 | | |
| DEX0377_78.nt.1 | SEQID | CLASP2 | UTR | | | | |
| | NO. 410 | | .0115 | | | | |
| DEX0377_78.nt.2 | SEQID | CLASP2 | UTR | | | | |
| | NO. 411 | | .0115 | | | | |
| DEX0377_79.nt.1 | SEQID | CLASP5 | UTR | LNG | BLO | FTS | BLD |
| | NO. 413 | CLASP1 | .0019 | .0003 | .0003 | .0003 | .0016 |
| DEX0377_79.nt.2 | SEQID | CLASP5 | UTR | LNG | BLO | FTS | BLD |
| | NO. 414 | CLASP1 | .0019 | .0003 | .0003 | .0003 | .0016 |
| DEX0377_80.nt.1 | SEQID | CLASP1 | UTR | BRN | BNC | | |
| | NO. 418 | | .0025 | .0001 | .0031 | | |
| DEX0377_81.nt.1 | SEQID | CLASP5 | UTR | FTS | BLO | OVR | MSL |
| | NO. 420 | CLASP1 | .0014 | .0005 | .0006 | .001 | .002 |
| DEX0377_82.nt.1 | SEQID | CLASP1 | UTR | BLO | | | |
| | NO. 424 | | .0011 | .0003 | | | |
| DEX0377_82.nt.2 | SEQID | CLASP1 | UTR | BLO | | | |
| | NO. 425 | | .0011 | .0003 | | | |
| DEX0377_83.nt.1 | SEQID | CLASP1 | UTR | | | | |
| | NO. 427 | | .0022 | | | | |
| DEX0377_84.nt.1 | SEQID | CLASP5 | | PNS | BLD | FTS | PRO |
| | NO. 429 | | | .0023 | .0032 | .0035 | .0051 |
| DEX0377_85.nt.1 | SEQID | CLASP2 | UTR | | | | |
| | NO. 434 | | .003 | | | | |
| DEX0377_86.nt.1 | SEQID | CLASP5 | UTR | KID | KID | | |
| | NO. 437 | CLASP1 | .0014 | .0006 | .0013 | | |
| DEX0377_87.nt.1 | SEQID | CLASP5 | UTR | MAM | | | |
| | NO. 439 | CLASP1 | .0019 | .0004 | | | |
| DEX0377_88.nt.1 | SEQID | CLASP1 | UTR | BLV | | | |
| | NO. 441 | | .0011 | .0006 | | | |
| DEX0377_89.nt.1 | SEQID | CLASP5 | UTR | BLD | BLD | | |
| | NO. 443 | CLASP1 | .0022 | .0032 | .0032 | | |
| DEX0377_90.nt.1 | SEQID | CLASP1 | UTR | BRN | FTS | | |
| | NO. 444 | | .0011 | .0001 | .0004 | | |
| DEX0377_91.nt.1 | SEQID | CLASP5 | UTR | OVR | NRV | OVR | BLD |
| | NO. 459 | CLASP1 | .0011 | .0007 | .0008 | .001 | .0016 |
| DEX0377_91.nt.2 | SEQID | CLASP5 | UTR | OVR | NRV | OVR | BLD |
| | NO. 460 | CLASP1 | .0011 | .0007 | .0008 | .001 | .0016 |
| DEX0377_92.nt.1 | SEQID | CLASP5 | UTR | PIT | UNC | BMR | SPC |
| | NO. 462 | CLASP3 | .0307 | .0041 | .008 | .0129 | .015 |
| DEX0377_93.nt.1 | SEQID | CLASP5 | UTR | BRN | LNG | BLO | FTS |
| | NO. 463 | CLASP1 | .0019 | .0001 | .0003 | .0003 | .0003 |
| DEX0377_94.nt.1 | SEQID | CLASP1 | UTR | BRN | | | |
| | NO. 464 | | .0011 | .0001 | | | |
| DEX0377_95.nt.1 | SEQID | CLASP1 | UTR | BRN | | | |
| | NO. 465 | | .0011 | .0001 | | | |
| DEX0377_96.nt.1 | SEQID | CLASP2 | UTR | | | | |
| | NO. 466 | | .0094 | | | | |
| DEX0377_97.nt.1 | SEQID | CLASP2 | UTR | | | | |
| | NO. 467 | | .0094 | | | | |
| DEX0377_98.nt.1 | SEQID | CLASP1 | UTR | INS | | | |
| | NO. 468 | | .0011 | .0009 | | | |
| DEX0377_99.nt.1 | SEQID | CLASP5 | | MAM | | | |
| | NO. 469 | | | .0005 | | | |
| DEX0377_100.nt.1 | SEQID | CLASP1 | UTR | | | | |
| | NO. 470 | | .0011 | | | | |
| DEX0377_101.nt.1 | SEQID | CLASP5 | UTR | MSL | CRD | SPC | UNC |
| | NO. 471 | CLASP4 | .0332 | .0079 | .0091 | .01 | .012 |
| DEX0377_102.nt.1 | SEQID | CLASP2 | UTR | ADR | | | |
| | NO. 472 | | .003 | .0014 | | | |

Abbreviation for Tissues:

[0422] ADR Adrenal Glands, BLD Bladder, BLO Blood, BLV Blood Vessels, BRN Brain, CON Connective Tissue, ESO Esophagus, FTS Fetus, INL Intestine, Large, INS Intestine, Small, LNG Lung, MAM Breast, NRV Nervous Tissue, OVR Ovary, PAN Pancreas, PNS Penis, PRO Prostate, SPL Spleen, STO Stomach, SYN Synovial Membranes, THR Thyroid Gland, THY Thymus Gland, UNC Mixed Tissues, UTR Uterus

[0423] The mapping of the nucleic acid (“NT”) SEQ ID NO; DEX ID; chromosomal location (if known); open reading frame (ORF) location; amino acid (“AA”) SEQ ID NO and AA DEX ID are shown in the table below:

| NT | | Chromo | | AA | |
|---|---|---|---|---|---|
| SEQ_No | NT_SEQID | Map | ORF_Loc | SEQ_NO | AA_SEQID |
| 1 | DEX0377_1.nt.1 | 4p14 | | 473 | DEX0377_1.aa.1 |
| 2 | DEX0377_1.nt.2 | 4p14 | | | |
| 3 | DEX0377_1.nt.3 | 4p14 | — | | |
| 4 | DEX0377_2.nt.1 | 18p11.23 | | | |
| 5 | DEX0377_2.nt.2 | 18p11.23 | — | | |
| 6 | DEX0377_3.nt.1 | 21q22.2 | | | |
| 7 | DEX0377_3.nt.2 | 21q22.2 | | | |
| 8 | DEX0377_3.nt.3 | 21q22.2 | — | | |
| 9 | DEX0377_3.nt.4 | 21q22.2 | — | | |
| 10 | DEX0377_3.nt.5 | 21q22.2 | — | | |
| 11 | DEX0377_3.nt.6 | 21q22.2 | — | | |
| 12 | DEX0377_3.nt.7 | 21q22.2 | — | | |
| 13 | DEX0377_3.nt.8 | 21q22.2 | — | | |
| 14 | DEX0377_3.nt.9 | 21q22.2 | — | | |
| 15 | DEX0377_3.nt.10 | 21q22.2 | — | | |
| 16 | DEX0377_3.nt.11 | 21q22.2 | — | | |
| 17 | DEX0377_3.nt.12 | 21q22.2 | — | | |
| 18 | DEX0377_3.nt.13 | 21q22.2 | — | | |
| 19 | DEX0377_3.nt.14 | 21q22.2 | — | | |
| 20 | DEX0377_3.nt.15 | 21q22.2 | — | | |
| 21 | DEX0377_3.nt.16 | 21q22.2 | — | | |
| 22 | DEX0377_3.nt.17 | 21q22.2 | — | | |
| 23 | DEX0377_3.nt.18 | 21q22.2 | — | | |
| 24 | DEX0377_3.nt.19 | 21q22.2 | — | | |
| 25 | DEX0377_3.nt.20 | 21q22.2 | — | | |
| 26 | DEX0377_3.nt.21 | 21q22.2 | — | | |
| 27 | DEX0377_3.nt.22 | 21q22.2 | 22-6957 | 474 | DEX0377_3.aa.22 |
| 28 | DEX0377_3.nt.23 | 21q22.2 | 22-510 | 475 | DEX0377_3.aa.23 |
| 29 | DEX0377_3.nt.24 | 21q22.2 | 22-510 | 475 | DEX0377_3.aa.23 |
| 30 | DEX0377_3.nt.25 | 21q22.2 | — | | |
| 31 | DEX0377_3.nt.26 | 21q22.2 | — | | |
| 32 | DEX0377_3.nt.27 | 21q22.2 | 22-510 | 475 | DEX0377_3.aa.23 |
| 33 | DEX0377_3.nt.28 | 21q22.2 | 148-7122 | 476 | DEX0377_3.aa.28 |
| 34 | DEX0377_3.nt.29 | 21q22.2 | 22-1584 | 477 | DEX0377_3.aa.29 |
| 35 | DEX0377_3.nt.30 | 21q22.2 | 22-1584 | 477 | DEX0377_3.aa.29 |
| 36 | DEX0377_3.nt.31 | 21q22.2 | 22-1584 | 477 | DEX0377_3.aa.29 |
| 37 | DEX0377_3.nt.32 | 21q22.2 | 22-1584 | 477 | DEX0377_3.aa.29 |
| 38 | DEX0377_3.nt.33 | 21q22.2 | — | | |
| 39 | DEX0377_3.nt.34 | 21q22.2 | — | | |
| 40 | DEX0377_3.nt.35 | 21q22.2 | 22-1179 | 478 | DEX0377_3.aa.35 |
| 41 | DEX0377_3.nt.36 | 21q22.2 | 116-611 | 479 | DEX0377_3.aa.36 |
| 42 | DEX0377_3.nt.37 | 21q22.2 | 22-7110 | 480 | DEX0377_3.aa.37 |
| 43 | DEX0377_3.nt.38 | 21q22.2 | 148-7275 | 481 | DEX0377_3.aa.38 |
| 44 | DEX0377_3.nt.39 | 21q22.2 | 22-510 | 475 | DEX0377_3.aa.23 |
| 45 | DEX0377_3.nt.40 | 21q22.2 | 148-6153 | 482 | DEX0377_3.aa.40 |
| 46 | DEX0377_3.nt.41 | 21q22.2 | 22-1584 | 477 | DEX0377_3.aa.29 |
| 47 | DEX0377_3.nt.42 | 21q22.2 | 22-1584 | 477 | DEX0377_3.aa.29 |
| 48 | DEX0377_3.nt.43 | 21q22.2 | 22-1584 | 477 | DEX0377_3.aa.29 |
| 49 | DEX0377_4.nt.1 | 3q26.32 | | 483 | DEX0377_4.aa.1 |
| 50 | DEX0377_4.nt.2 | 3q26.32 | | | |
| 51 | DEX0377_4.nt.3 | 3q26.32 | — | | |
| 52 | DEX0377_4.nt.4 | 3q26.32 | — | | |
| 53 | DEX0377_4.nt.5 | 3q26.32 | — | | |
| 54 | DEX0377_4.nt.6 | 3q26.32 | — | | |
| 55 | DEX0377_4.nt.7 | 3q26.32 | — | | |
| 56 | DEX0377_4.nt.8 | 3q26.32 | — | | |
| 57 | DEX0377_4.nt.9 | 3q26.32 | — | | |
| 58 | DEX0377_5.nt.1 | 1q25.3 | | 484 | DEX0377_5.aa.1 |
| 59 | DEX0377_5.nt.2 | 1q25.3 | — | | |
| 60 | DEX0377_6.nt.1 | 4q13.2 | | 485 | DEX0377_6.aa.1 |
| 61 | DEX0377_6.nt.2 | 4q13.2 | — | | |
| 62 | DEX0377_7.nt.1 | 17q24.1 | | 486 | DEX0377_7.aa.1 |
| 63 | DEX0377_7.nt.2 | 17q24.1 | | | |
| 64 | DEX0377_7.nt.3 | 17q24.1 | 440-767 | 487 | DEX0377_7.aa.3 |
| 65 | DEX0377_8.nt.1 | 10p15.3 | | 488 | DEX0377_8.aa.1 |
| 66 | DEX0377_8.nt.2 | 10p15.3 | 1-389 | 489 | DEX0377_8.aa.2 |
| 67 | DEX0377_8.nt.3 | 10p15.3 | 178-4994 | 490 | DEX0377_8.aa.3 |
| 68 | DEX0377_8.nt.4 | 10p15.3 | 178-4826 | 491 | DEX0377_8.aa.4 |
| 69 | DEX0377_8.nt.5 | 10p15.3 | 178-4994 | 490 | DEX0377_8.aa.3 |
| 70 | DEX0377_8.nt.6 | 10p15.3 | 462-4725 | 492 | DEX0377_8.aa.6 |
| 71 | DEX0377_8.nt.7 | 10p15.3 | 1-3949 | 493 | DEX0377_8.aa.7 |
| 72 | DEX0377_8.nt.8 | 10p15.3 | 441-3942 | 494 | DEX0377_8.aa.8 |
| 73 | DEX0377_8.nt.9 | 10p15.3 | 64-1825 | 495 | DEX0377_8.aa.9 |
| 74 | DEX0377_8.nt.10 | 10p15.3 | 178-5561 | 496 | DEX0377_8.aa.10 |
| 75 | DEX0377_8.nt.11 | 10p15.3 | 178-5528 | 497 | DEX0377_8.aa.11 |
| 76 | DEX0377_8.nt.12 | 10p15.3 | 178-5249 | 498 | DEX0377_8.aa.12 |
| 77 | DEX0377_8.nt.13 | 10p15.3 | 178-2993 | 499 | DEX0377_8.aa.13 |
| 78 | DEX0377_8.nt.14 | 10p15.3 | 1-214 | 500 | DEX0377_8.aa.14 |
| 79 | DEX0377_8.nt.15 | 10p15.3 | 178-4994 | 490 | DEX0377_8.aa.3 |
| 80 | DEX0377_8.nt.16 | 10p15.3 | 178-5498 | 501 | DEX0377_8.aa.16 |
| 81 | DEX0377_8.nt.17 | 10p15.3 | 178-4994 | 490 | DEX0377_8.aa.3 |
| 82 | DEX0377_8.nt.18 | 10p15.3 | 178-5528 | 497 | DEX0377_8.aa.11 |
| 83 | DEX0377_8.nt.19 | 10p15.3 | 740-1103 | 502 | DEX0377_8.aa.19 |
| 84 | DEX0377_8.nt.20 | 10p15.3 | 178-5498 | 501 | DEX0377_8.aa.16 |
| 85 | DEX0377_8.nt.21 | 10p15.3 | 178-5249 | 503 | DEX0377_8.aa.21 |
| 86 | DEX0377_8.nt.22 | 10p15.3 | 1-443 | 504 | DEX0377_8.aa.22 |
| 87 | DEX0377_9.nt.1 | 14q24.1 | | | |
| 88 | DEX0377_9.nt.2 | 14q24.1 | — | | |
| 89 | DEX0377_10.nt.1 | 1p31.2 | | 505 | DEX0377_10.aa.1 |
| 90 | DEX0377_10.nt.2 | 1p31.2 | | | |
| 91 | DEX0377_10.nt.3 | 1p31.2 | — | | |
| 92 | DEX0377_11.nt.1 | 11q24.1 | | 506 | DEX0377_11.aa.1 |
| 93 | DEX0377_11.nt.2 | 11q24.1 | | | |
| 94 | DEX0377_11.nt.3 | 11q24.1 | — | | |
| 95 | DEX0377_11.nt.4 | 11q24.1 | — | | |
| 96 | DEX0377_11.nt.5 | 11q24.1 | — | | |
| 97 | DEX0377_11.nt.6 | 11q24.1 | — | | |
| 98 | DEX0377_11.nt.7 | 11q24.1 | — | | |
| 99 | DEX0377_11.nt.8 | 11q24.1 | — | | |
| 100 | DEX0377_11.nt.9 | 11q24.1 | — | | |
| 101 | DEX0377_11.nt.10 | 11q24.1 | — | | |
| 102 | DEX0377_11.nt.11 | 11q24.1 | — | | |
| 103 | DEX0377_11.nt.12 | 11q24.1 | — | | |
| 104 | DEX0377_11.nt.13 | 11q24.1 | — | | |
| 105 | DEX0377_11.nt.14 | 11q24.1 | — | | |
| 106 | DEX0377_11.nt.15 | 11q24.1 | — | | |
| 107 | DEX0377_11.nt.16 | 11q24.1 | — | | |
| 108 | DEX0377_11.nt.17 | 11q24.1 | — | | |
| 109 | DEX0377_11.nt.18 | 11q24.1 | — | | |
| 110 | DEX0377_11.nt.19 | 11q24.1 | — | | |
| 111 | DEX0377_11.nt.20 | 11q24.1 | — | | |
| 112 | DEX0377_11.nt.21 | 11q24.1 | — | | |
| 113 | DEX0377_11.nt.22 | 11q24.1 | — | | |
| 114 | DEX0377_11.nt.23 | 11q24.1 | — | | |
| 115 | DEX0377_11.nt.24 | 11q24.1 | — | | |
| 116 | DEX0377_11.nt.25 | 11q24.1 | — | | |
| 117 | DEX0377_11.nt.26 | 11q24.1 | — | | |
| 118 | DEX0377_11.nt.27 | 11q24.1 | — | | |
| 119 | DEX0377_11.nt.28 | 11q24.1 | — | | |
| 120 | DEX0377_11.nt.29 | 11q24.1 | — | | |
| 121 | DEX0377_11.nt.30 | 11q24.1 | — | | |
| 122 | DEX0377_11.nt.31 | 11q24.1 | — | | |
| 123 | DEX0377_11.nt.32 | 11q24.1 | — | | |
| 124 | DEX0377_12.nt.1 | 5q12.1 | | 507 | DEX0377_12.aa.1 |
| 125 | DEX0377_12.nt.2 | 5q12.1 | — | | |
| 126 | DEX0377_12.nt.3 | 5q12.1 | — | | |
| 127 | DEX0377_13.nt.1 | 14q32.33 | | 508 | DEX0377_13.aa.1 |
| 128 | DEX0377_14.nt.1 | 12p12.1 | | 509 | DEX0377_14.aa.1 |
| 129 | DEX0377_14.nt.2 | 12p12.1 | — | | |
| 130 | DEX0377_15.nt.1 | *9q12 | | 510 | DEX0377_15.aa.1 |
| 131 | DEX0377_15.nt.2 | *2p11.2 | — | | |
| 132 | DEX0377_16.nt.1 | 3p13 | | | |
| 133 | DEX0377_16.nt.2 | 3p13 | | 511 | DEX0377_16.aa.2 |
| 134 | DEX0377_16.nt.3 | 3p13 | — | | |
| 135 | DEX0377_16.nt.4 | 3p13 | — | | |
| 136 | DEX0377_16.nt.5 | 3p13 | — | | |
| 137 | DEX0377_17.nt.1 | 17p12 | | 512 | DEX0377_17.aa.1 |
| 138 | DEX0377_18.nt.1 | 1p34.3 | | 513 | DEX0377_18.aa.1 |
| 139 | DEX0377_18.nt.2 | 1p34.3 | | | |
| 140 | DEX0377_19.nt.1 | 8q22.3 | | 514 | DEX0377_19.aa.1 |
| 141 | DEX0377_19.nt.2 | * | — | | |
| 142 | DEX0377_19.nt.3 | 8q22.3 | — | | |
| 143 | DEX0377_20.nt.1 | 6q24.3 | | | |
| 144 | DEX0377_20.nt.2 | * | 477-826 | 515 | DEX0377_20.aa.2 |
| 145 | DEX0377_20.nt.3 | * | 490-1276 | 516 | DEX0377_20.aa.3 |
| 146 | DEX0377_20.nt.4 | * | - | | |
| 147 | DEX0377_20.nt.5 | * | 1-198 | 517 | DEX0377_20.aa.5 |
| 148 | DEX0377_20.nt.6 | * | - | | |
| 149 | DEX0377_20.nt.7 | 14q12 | 1-372 | 518 | DEX0377_20.aa.7 |
| 150 | DEX0377_20.nt.8 | 14q12 | 1-333 | 519 | DEX0377_20.aa.8 |
| 151 | DEX0377_20.nt.9 | 13q12.3 | - | | |
| 152 | DEX0377_20.nt.10 | 13q12.3 | - | | |
| 153 | DEX0377_20.nt.11 | 13q12.3 | 160-715 | 520 | DEX0377_20.aa.11 |
| 154 | DEX0377_20.nt.12 | * | 1-108 | 521 | DEX0377_20.aa.12 |
| 155 | DEX0377_20.nt.13 | * | 688-4300 | 522 | DEX0377_20.aa.13 |
| 156 | DEX0377_20.nt.14 | * | 688-3787 | 523 | DEX0377_20.aa.14 |
| 157 | DEX0377_20.nt.15 | * | 688-4051 | 524 | DEX0377_20.aa.15 |
| 158 | DEX0377_20.nt.16 | * | — | | |
| 159 | DEX0377_20.nt.17 | * | 361-670 | 525 | DEX0377_20.aa.17 |
| 160 | DEX0377_20.nt.18 | * | 688-4402 | 526 | DEX0377_20.aa.18 |
| 161 | DEX0377_20.nt.19 | * | 688-4231 | 527 | DEX0377_20.aa.19 |
| 162 | DEX0377_20.nt.20 | * | 688-4051 | 524 | DEX0377_20.aa.15 |
| 163 | DEX0377_21.nt.1 | 12q14.3 | | | |
| 164 | DEX0377_21.nt.2 | 12q14.3 | | | |
| 165 | DEX0377_21.nt.3 | 12q14.3 | | 528 | DEX0377_21.aa.3 |
| 166 | DEX0377_21.nt.4 | 12q14.3 | — | | |
| 167 | DEX0377_21.nt.5 | 12q14.3 | — | | |
| 168 | DEX0377_22.nt.1 | 1q42.2 | | 529 | DEX0377_22.aa.1 |
| 169 | DEX0377_22.nt.2 | 1q42.2 | — | | |
| 170 | DEX0377_23.nt.1 | 6q24.2 | | 530 | DEX0377_23.aa.1 |
| 171 | DEX0377_23.nt.2 | 6q24.2 | — | | |
| 172 | DEX0377_24.nt.1 | 18q23 | | 531 | DEX0377_24.aa.1 |
| 173 | DEX0377_24.nt.2 | 18q23 | | | |
| 174 | DEX0377_24.nt.3 | 18q23 | 6-381 | 532 | DEX0377_24.aa.3 |
| 175 | DEX0377_25.nt.1 | 15q23 | | 533 | DEX0377_25.aa.1 |
| 176 | DEX0377_25.nt.2 | 15q23 | — | | |
| 177 | DEX0377_26.nt.1 | 9q21.12 | | 534 | DEX0377_26.aa.1 |
| 178 | DEX0377_26.nt.2 | 9q21.12 | | | |
| 179 | DEX0377_26.nt.3 | 9q21.12 | — | | |
| 180 | DEX0377_26.nt.4 | 9q21.12 | — | | |
| 181 | DEX0377_26.nt.5 | 9q21.12 | 1-137 | 535 | DEX0377_26.aa.5 |
| 182 | DEX0377_26.nt.6 | 9q21.12 | — | | |
| 183 | DEX0377_26.nt.7 | 9q21.12 | 46-773 | 536 | DEX0377_26.aa.7 |
| 184 | DEX0377_26.nt.8 | 9q21.12 | — | | |
| 185 | DEX0377_26.nt.9 | 9q21.12 | 46-428 | 537 | DEX0377_26.aa.9 |
| 186 | DEX0377_26.nt.10 | 9q21.12 | 46-998 | 538 | DEX0377_26.aa.10 |
| 187 | DEX0377_26.nt.11 | 9q21.12 | 1-828 | 539 | DEX0377_26.aa.11 |
| 188 | DEX0377_27.nt.1 | 2q36.3 | | 540 | DEX0377_27.aa.1 |
| 189 | DEX0377_27.nt.2 | 2q36.3 | — | | |
| 190 | DEX0377_28.nt.1 | 17q12 | | 541 | DEX0377_28.aa.1 |
| 191 | DEX0377_28.nt.2 | 17q12 | | | |
| 192 | DEX0377_28.nt.3 | 17q12 | — | | |
| 193 | DEX0377_29.nt.1 | 8q24.22 | | 542 | DEX0377_29.aa.1 |
| 194 | DEX0377_29.nt.2 | 8q24.22 | | | |
| 195 | DEX0377_29.nt.3 | * | — | | |
| 196 | DEX0377_30.nt.1 | 17q11.2 | | 543 | DEX0377_30.aa.1 |
| 197 | DEX0377_30.nt.2 | 17q11.2 | | | |
| 198 | DEX0377_30.nt.3 | 17q11.2 | — | | |
| 199 | DEX0377_31.nt.1 | 20p11.23 | | 544 | DEX0377_31.aa.1 |
| 200 | DEX0377_31.nt.2 | 20p11.23 | | | |
| 201 | DEX0377_31.nt.3 | 20p11.23 | — | | |
| 202 | DEX0377_32.nt.1 | 5q31.3 | | | |
| 203 | DEX0377_32.nt.2 | 5q31.3 | 139-2524 | 545 | DEX0377_32.aa.2 |
| 204 | DEX0377_33.nt.1 | 18p11.23 | | | |
| 205 | DEX0377_33.nt.2 | 18p11.23 | — | | |
| 206 | DEX0377_34.nt.1 | 7q36.1 | | 546 | DEX0377_34.aa.1 |
| 207 | DEX0377_34.nt.2 | 7q36.1 | 679-1055 | 547 | DEX0377_34.aa.2 |
| 208 | DEX0377_34.nt.3 | 7q36.1 | 788-1164 | 547 | DEX0377_34.aa.2 |
| 209 | DEX0377_34.nt.4 | 7q36.1 | 235-609 | 547 | DEX0377_34.aa.2 |
| 210 | DEX0377_34.nt.5 | 7q36.1 | 1-493 | 548 | DEX0377_34.aa.5 |
| 211 | DEX0377_35.nt.1 | 3q13.33 | | 549 | DEX0377_35.aa.1 |
| 212 | DEX0377_35.nt.2 | 3q13.33 | 109-349 | 550 | DEX0377_35.aa.2 |
| 213 | DEX0377_35.nt.3 | 3q13.33 | 617-1016 | 551 | DEX0377_35.aa.3 |
| 214 | DEX0377_35.nt.4 | 3q13.33 | — | | |
| 215 | DEX0377_35.nt.5 | 3q13.33 | — | | |
| 216 | DEX0377_35.nt.6 | 3q13.33 | — | | |
| 217 | DEX0377_35.nt.7 | 3q13.33 | 1-420 | 552 | DEX0377_35.aa.7 |
| 218 | DEX0377_35.nt.8 | 3q13.33 | — | | |
| 219 | DEX0377_35.nt.9 | 3q13.33 | — | | |
| 220 | DEX0377_35.nt.10 | 3q13.33 | — | | |
| 221 | DEX0377_36.nt.1 | 14q21.2 | | 553 | DEX0377_36.aa.1 |
| 222 | DEX0377_36.nt.2 | 14q21.2 | — | | |
| 223 | DEX0377_37.nt.1 | * | | 554 | DEX0377_37.aa.1 |
| 224 | DEX0377_37.nt.2 | * | 139-603 | 555 | DEX0377_37.aa.2 |
| 225 | DEX0377_37.nt.3 | * | 70-663 | 556 | DEX0377_37.aa.3 |
| 226 | DEX0377_38.nt.1 | 2p14 | | 557 | DEX0377_38.aa.1 |
| 227 | DEX0377_38.nt.2 | 2p14 | — | | |
| 228 | DEX0377_39.nt.1 | 1p36.33 | | 558 | DEX0377_39.aa.1 |
| 229 | DEX0377_39.nt.2 | 1p36.33 | | 559 | DEX0377_39.aa.2 |
| 230 | DEX0377_39.nt.3 | 1p36.33 | | | |
| 231 | DEX0377_39.nt.4 | 1p36.33 | — | | |
| 232 | DEX0377_39.nt.5 | 1p36.33 | — | | |
| 233 | DEX0377_39.nt.6 | 1p36.33 | — | | |
| 234 | DEX0377_40.nt.1 | 4q26 | | 560 | DEX0377_40.aa.1 |
| 235 | DEX0377_40.nt.2 | 4q26 | — | | |
| 236 | DEX0377_41.nt.1 | 5q12.3 | | 561 | DEX0377_41.aa.1 |
| 237 | DEX0377_41.nt.2 | 5q12.3 | — | | |
| 238 | DEX0377_41.nt.3 | 5q12.3 | 1-156 | 562 | DEX0377_41.aa.3 |
| 239 | DEX0377_41.nt.4 | 5q12.3 | 278-1076 | 563 | DEX0377_41.aa.4 |
| 240 | DEX0377_41.nt.5 | 5q12.3 | — | | |
| 241 | DEX0377_41.nt.6 | 5q12.3 | — | | |
| 242 | DEX0377_41.nt.7 | 5q12.3 | — | | |
| 243 | DEX0377_41.nt.8 | 5q12.3 | — | | |
| 244 | DEX0377_41.nt.9 | 5q12.3 | — | | |
| 245 | DEX0377_41.nt.10 | 5q12.3 | 278-7022 | 564 | DEX0377_41.aa.10 |
| 246 | DEX0377_41.nt.11 | 5q12.3 | 278-7430 | 565 | DEX0377_41.aa.11 |
| 247 | DEX0377_41.nt.12 | 5q12.3 | 278-4031 | 566 | DEX0377_41.aa.12 |
| 248 | DEX0377_41.nt.13 | 5q12.3 | 278-4286 | 567 | DEX0377_41.aa.13 |
| 249 | DEX0377_41.nt.14 | 5q12.3 | 278-3101 | 568 | DEX0377_41.aa.14 |
| 250 | DEX0377_41.nt.15 | 5q12.3 | — | | |
| 251 | DEX0377_41.nt.16 | 5q12.3 | — | | |
| 252 | DEX0377_41.nt.17 | 5q12.3 | 278-1238 | 569 | DEX0377_41.aa.17 |
| 253 | DEX0377_41.nt.18 | 5q12.3 | 278-1031 | 570 | DEX0377_41.aa.18 |
| 254 | DEX0377_41.nt.19 | 5q12.3 | 278-1112 | 571 | DEX0377_41.aa.19 |
| 255 | DEX0377_41.nt.20 | 5q12.3 | 278-1052 | 572 | DEX0377_41.aa.20 |
| 256 | DEX0377_41.nt.21 | 5q12.3 | 297-963 | 573 | DEX0377_41.aa.21 |
| 257 | DEX0377_42.nt.1 | 12p13.33 | | 574 | DEX0377_42.aa.1 |
| 258 | DEX0377_42.nt.2 | 12p13.33 | | | |
| 259 | DEX0377_42.nt.3 | 12p13.33 | — | | |
| 260 | DEX0377_42.nt.4 | 12p13.33 | — | | |
| 261 | DEX0377_43.nt.1 | 11q12.1 | | 575 | DEX0377_43.aa.1 |
| 262 | DEX0377_43.nt.2 | 11q12.1 | | | |
| 263 | DEX0377_43.nt.3 | 11q12.1 | — | | |
| 264 | DEX0377_43.nt.4 | 11q12.1 | — | | |
| 265 | DEX0377_43.nt.5 | 11q12.1 | 175-1123 | 576 | DEX0377_43.aa.5 |
| 266 | DEX0377_43.nt.6 | 11q12.1 | — | | |
| 267 | DEX0377_43.nt.7 | 11q12.1 | — | | |
| 268 | DEX0377_43.nt.8 | 11q12.1 | 1-367 | 577 | DEX0377_43.aa.8 |
| 269 | DEX0377_44.nt.1 | 6q14.3 | | | |
| 270 | DEX0377_44.nt.2 | 6q14.3 | — | | |
| 271 | DEX0377_45.nt.1 | 4p15.2 | | 578 | DEX0377_45.aa.1 |
| 272 | DEX0377_45.nt.2 | 4p15.2 | — | | |
| 273 | DEX0377_46.nt.1 | 1q32.1 | | | |
| 274 | DEX0377_46.nt.2 | 1q32.1 | | | |
| 275 | DEX0377_46.nt.3 | 1q32.1 | | 579 | DEX0377_46.aa.3 |
| 276 | DEX0377_46.nt.4 | 1q32.1 | | | |
| 277 | DEX0377_46.nt.5 | 1q32.1 | 167-590 | 580 | DEX0377_46.aa.5 |
| 278 | DEX0377_46.nt.6 | 1q32.1 | 167-491 | 581 | DEX0377_46.aa.6 |
| 279 | DEX0377_46.nt.7 | 1q32.1 | — | | |
| 280 | DEX0377_46.nt.8 | 1q32.1 | — | | |
| 281 | DEX0377_46.nt.9 | 1q32.1 | — | | |
| 282 | DEX0377_46.nt.10 | 1q32.1 | 362-1496 | 582 | DEX0377_46.aa.10 |
| 283 | DEX0377_46.nt.11 | 1q32.1 | — | | |
| 284 | DEX0377_46.nt.12 | 1q32.1 | 136-1276 | 583 | DEX0377_46.aa.12 |
| 285 | DEX0377_46.nt.13 | 1q32.1 | — | | |
| 286 | DEX0377_46.nt.14 | 1q32.1 | 167-1199 | 584 | DEX0377_46.aa.14 |
| 287 | DEX0377_46.nt.15 | 1q32.1 | — | | |
| 288 | DEX0377_46.nt.16 | 1q32.1 | 167-614 | 585 | DEX0377_46.aa.16 |
| 289 | DEX0377_46.nt.17 | * | — | | |
| 290 | DEX0377_47.nt.1 | 19p13.2 | | | |
| 291 | DEX0377_47.nt.2 | 19p13.2 | — | | |
| 292 | DEX0377_48.nt.1 | 19p13.2 | | 586 | DEX0377_48.aa.1 |
| 293 | DEX0377_48.nt.2 | 19p13.2 | — | | |
| 294 | DEX0377_48.nt.3 | 19p13.2 | — | | |
| 295 | DEX0377_49.nt.1 | 15q15.3 | | 587 | DEX0377_49.aa.1 |
| 296 | DEX0377_49.nt.2 | 15q15.3 | | 588 | DEX0377_49.aa.2 |
| 297 | DEX0377_49.nt.3 | * | | | |
| 298 | DEX0377_49.nt.4 | 15q15.3 | 100-465 | 589 | DEX0377_49.aa.4 |
| 299 | DEX0377_49.nt.5 | 15q15.3 | 1-297 | 590 | DEX0377_49.aa.5 |
| 300 | DEX0377_49.nt.6 | 15q15.3 | 213-560 | 591 | DEX0377_49.aa.6 |
| 301 | DEX0377_49.nt.7 | 15q15.3 | 19-629 | 592 | DEX0377_49.aa.7 |
| 302 | DEX0377_49.nt.8 | 15q15.3 | 508-1117 | 593 | DEX0377_49.aa.8 |
| 303 | DEX0377_49.nt.9 | 15q15.3 | 213-450 | 594 | DEX0377_49.aa.9 |
| 304 | DEX0377_49.nt.10 | 15q15.3 | 100-482 | 595 | DEX0377_49.aa.10 |
| 305 | DEX0377_49.nt.11 | 15q15.3 | 85-450 | 596 | DEX0377_49.aa.11 |
| 306 | DEX0377_49.nt.12 | 15q15.3 | 213-825 | 597 | DEX0377_49.aa.12 |
| 307 | DEX0377_49.nt.13 | 15q15.3 | 1-300 | 598 | DEX0377_49.aa.13 |
| 308 | DEX0377_49.nt.14 | 15q15.3 | 508-1117 | 593 | DEX0377_49.aa.8 |
| 309 | DEX0377_49.nt.15 | 15q15.3 | 213-448 | 599 | DEX0377_49.aa.15 |
| 310 | DEX0377_50.nt.1 | 6q23.2 | | 600 | DEX0377_50.aa.1 |
| 311 | DEX0377_50.nt.2 | 6q23.2 | 40-150 | 601 | DEX0377_50.aa.2 |
| 312 | DEX0377_51.nt.1 | 1q32.1 | | 602 | DEX0377_51.aa.1 |
| 313 | DEX0377_51.nt.2 | 1q32.1 | — | | |
| 314 | DEX0377_52.nt.1 | 11p15.3 | | | |
| 315 | DEX0377_52.nt.2 | 11p15.3 | — | | |
| 316 | DEX0377_53.nt.1 | 10q22.3 | | 603 | DEX0377_53.aa.1 |
| 317 | DEX0377_53.nt.2 | 10q22.3 | | | |
| 318 | DEX0377_53.nt.3 | 10q22.3 | — | | |
| 319 | DEX0377_54.nt.1 | 3p25.3 | | 604 | DEX0377_54.aa.1 |
| 320 | DEX0377_55.nt.1 | 13q12.2 | | 605 | DEX0377_55.aa.1 |
| 321 | DEX0377_55.nt.2 | 13q12.2 | — | | |
| 322 | DEX0377_56.nt.1 | 19q13.41 | | 606 | DEX0377_56.aa.1 |
| 323 | DEX0377_56.nt.2 | 19q13.41 | — | | |
| 324 | DEX0377_56.nt.3 | 19q13.41 | 1323-1656 | 607 | DEX0377_56.aa.3 |
| 325 | DEX0377_56.nt.4 | 19q13.41 | 1-372 | 608 | DEX0377_56.aa.4 |
| 326 | DEX0377_56.nt.5 | 19q13.41 | — | | |
| 327 | DEX0377_56.nt.6 | 19q13.41 | — | | |
| 328 | DEX0377_56.nt.7 | 19q13.41 | 1021-1342 | 609 | DEX0377_56.aa.7 |
| 329 | DEX0377_56.nt.8 | 19q13.41 | — | | |
| 330 | DEX0377_56.nt.9 | 19q13.41 | — | | |
| 331 | DEX0377_56.nt.10 | 19q13.41 | — | | |
| 332 | DEX0377_56.nt.11 | 19q13.41 | 1323-1911 | 610 | DEX0377_56.aa.11 |
| 333 | DEX0377_56.nt.12 | 19q13.41 | 1021-1438 | 611 | DEX0377_56.aa.12 |
| 334 | DEX0377_56.nt.13 | 19q13.41 | 1021-1475 | 612 | DEX0377_56.aa.13 |
| 335 | DEX0377_57.nt.1 | 3p14.1 | | 613 | DEX0377_57.aa.1 |
| 336 | DEX0377_57.nt.2 | 3p14.1 | 1-119 | 614 | DEX0377_57.aa.2 |
| 337 | DEX0377_57.nt.3 | 3p14.1 | 1-119 | 614 | DEX0377_57.aa.2 |
| 338 | DEX0377_58.nt.1 | 2q37.3 | | 615 | DEX0377_58.aa.1 |
| 339 | DEX0377_59.nt.1 | 1q23.3 | | 616 | DEX0377_59.aa.1 |
| 340 | DEX0377_59.nt.2 | 1q23.3 | | | |
| 341 | DEX0377_59.nt.3 | 1q23.3 | — | | |
| 342 | DEX0377_60.nt.1 | 5p15.1 | | 617 | DEX0377_60.aa.1 |
| 343 | DEX0377_60.nt.2 | 5p15.1 | — | | |
| 344 | DEX0377_61.nt.1 | 12q13.11 | | 618 | DEX0377_61.aa.1 |
| 345 | DEX0377_61.nt.2 | 12q13.11 | — | | |
| 346 | DEX0377_62.nt.1 | 20p11.23 | | 619 | DEX0377_62.aa.1 |
| 347 | DEX0377_62.nt.2 | 20p11.23 | | | |
| 348 | DEX0377_62.nt.3 | 20p11.23 | — | | |
| 349 | DEX0377_63.nt.1 | 16q12.1 | | 620 | DEX0377_63.aa.1 |
| 350 | DEX0377_63.nt.2 | 16q12.1 | — | | |
| 351 | DEX0377_64.nt.1 | 14q24.2 | | 621 | DEX0377_64.aa.1 |
| 352 | DEX0377_64.nt.2 | 14q24.2 | — | | |
| 353 | DEX0377_65.nt.1 | 5p15.1 | | 622 | DEX0377_65.aa.1 |
| 354 | DEX0377_65.nt.2 | 5p15.1 | — | | |
| 355 | DEX0377_66.nt.1 | 20p13 | | 623 | DEX0377_66.aa.1 |
| 356 | DEX0377_66.nt.2 | 20p13 | — | | |
| 357 | DEX0377_67.nt.1 | 2q11.2 | | | |
| 358 | DEX0377_67.nt.2 | 2q11.2 | — | | |
| 359 | DEX0377_68.nt.1 | 1p36.33 | | 624 | DEX0377_68.aa.1 |
| 360 | DEX0377_68.nt.2 | 1p36.33 | | | |
| 361 | DEX0377_68.nt.3 | 1p36.33 | — | | |
| 362 | DEX0377_68.nt.4 | 1p36.33 | — | | |
| 363 | DEX0377_69.nt.1 | 4p16.1 | | 625 | DEX0377_69.aa.1 |
| 364 | DEX0377_69.nt.2 | 4p16.1 | 1-125 | 626 | DEX0377_69.aa.2 |
| 365 | DEX0377_69.nt.3 | 4p16.1 | 1-125 | 626 | DEX0377_69.aa.2 |
| 366 | DEX0377_70.nt.1 | 14q22.1 | | 627 | DEX0377_70.aa.1 |
| 367 | DEX0377_70.nt.2 | 14q22.1 | | 628 | DEX0377_70.aa.2 |
| 368 | DEX0377_70.nt.3 | 14q22.1 | — | | |
| 369 | DEX0377_70.nt.4 | 14q22.1 | — | | |
| 370 | DEX0377_71.nt.1 | 11q13.3 | | | |
| 371 | DEX0377_71.nt.2 | 11q13.3 | — | | |
| 372 | DEX0377_71.nt.3 | 11q13.3 | — | | |
| 373 | DEX0377_72.nt.1 | 17q25.3 | | 629 | DEX0377_72.aa.1 |
| 374 | DEX0377_72.nt.2 | 17q25.3 | — | | |
| 375 | DEX0377_73.nt.1 | 4p15.2 | | 630 | DEX0377_73.aa.1 |
| 376 | DEX0377_73.nt.2 | 4p15.2 | — | | |
| 377 | DEX0377_73.nt.3 | 4p15.2 | — | | |
| 378 | DEX0377_74.nt.1 | 19q13.33 | | 631 | DEX0377_74.aa.1 |
| 379 | DEX0377_74.nt.2 | 19q13.33 | | | |
| 380 | DEX0377_74.nt.3 | 19q13.33 | — | | |
| 381 | DEX0377_74.nt.4 | 19q13.33 | — | | |
| 382 | DEX0377_74.nt.5 | 19q13.33 | — | | |
| 383 | DEX0377_74.nt.6 | 19q13.33 | — | | |
| 384 | DEX0377_74.nt.7 | 19q13.33 | 223-1837 | 632 | DEX0377_74.aa.7 |
| 385 | DEX0377_74.nt.8 | 19q13.33 | 1-1350 | 633 | DEX0377_74.aa.8 |
| 386 | DEX0377_74.nt.9 | 19q13.33 | — | | |
| 387 | DEX0377_74.nt.10 | 19q13.33 | 334-688 | 634 | DEX0377_74.aa.10 |
| 388 | DEX0377_74.nt.11 | 19q13.33 | 334-688 | 634 | DEX0377_74.aa.10 |
| 389 | DEX0377_74.nt.12 | 19q13.33 | — | | |
| 390 | DEX0377_74.nt.13 | 19q13.33 | 359-719 | 635 | DEX0377_74.aa.13 |
| 391 | DEX0377_74.nt.14 | 19q13.33 | 2573-4007 | 636 | DEX0377_74.aa.14 |
| 392 | DEX0377_74.nt.15 | 19q13.33 | 334-1948 | 632 | DEX0377_74.aa.7 |
| 393 | DEX0377_74.nt.16 | 19q13.33 | 2573-3674 | 637 | DEX0377_74.aa.16 |
| 394 | DEX0377_74.nt.17 | 19q13.33 | 334-688 | 634 | DEX0377_74.aa.10 |
| 395 | DEX0377_75.nt.1 | 9p13.1 | | 638 | DEX0377_75.aa.1 |
| 396 | DEX0377_75.nt.2 | 9p13.1 | — | | |
| 397 | DEX0377_76.nt.1 | 22q11.23 | | | |
| 398 | DEX0377_76.nt.2 | 22q11.23 | — | | |
| 399 | DEX0377_77.nt.1 | 13q34 | | 639 | DEX0377_77.aa.1 |
| 400 | DEX0377_77.nt.2 | 13q34 | | | |
| 401 | DEX0377_77.nt.3 | 13q34 | | 640 | DEX0377_77.aa.3 |
| 402 | DEX0377_77.nt.4 | 13q34 | | | |
| 403 | DEX0377_77.nt.5 | 13q34 | 154-379 | 641 | DEX0377_77.aa.5 |
| 404 | DEX0377_77.nt.6 | 13q34 | 91-454 | 642 | DEX0377_77.aa.6 |
| 405 | DEX0377_77.nt.7 | 13q34 | — | | |
| 406 | DEX0377_77.nt.8 | 13q34 | 287-1385 | 643 | DEX0377_77.aa.8 |
| 407 | DEX0377_77.nt.9 | 13q34 | 268-811 | 644 | DEX0377_77.aa.9 |
| 408 | DEX0377_77.nt.10 | 13q34 | 73-504 | 645 | DEX0377_77.aa.10 |
| 409 | DEX0377_77.nt.11 | 13q34 | 287-782 | 646 | DEX0377_77.aa.11 |
| 410 | DEX0377_78.nt.1 | 19q13.12 | | 647 | DEX0377_78.aa.1 |
| 411 | DEX0377_78.nt.2 | 19q13.12 | | | |
| 412 | DEX0377_78.nt.3 | 19q13.12 | — | | |
| 413 | DEX0377_79.nt.1 | 11q13.3 | | 648 | DEX0377_79.aa.1 |
| 414 | DEX0377_79.nt.2 | 11q13.3 | | | |
| 415 | DEX0377_79.nt.3 | 11q13.3 | — | | |
| 416 | DEX0377_79.nt.4 | 11q13.3 | — | | |
| 417 | DEX0377_79.nt.5 | 11q13.3 | — | | |
| 418 | DEX0377_80.nt.1 | Xp22.33 | | 649 | DEX0377_80.aa.1 |
| 419 | DEX0377_80.nt.2 | Xp22.33 | — | | |
| 420 | DEX0377_81.nt.1 | 8q24.11 | | 650 | DEX0377_81.aa.1 |
| 421 | DEX0377_81.nt.2 | 8q24.11 | — | | |
| 422 | DEX0377_81.nt.3 | 8q24.11 | — | | |
| 423 | DEX0377_81.nt.4 | 8q24.11 | — | | |
| 424 | DEX0377_82.nt.1 | 10q11.23 | | 651 | DEX0377_82.aa.1 |
| 425 | DEX0377_82.nt.2 | 10q11.23 | | | |
| 426 | DEX0377_82.nt.3 | 10q11.23 | — | | |
| 427 | DEX0377_83.nt.1 | 9p22.1 | | 652 | DEX0377_83.aa.1 |
| 428 | DEX0377_83.nt.2 | 9p22.1 | — | | |
| 429 | DEX0377_84.nt.1 | 19q13.42 | | | |
| 430 | DEX0377_84.nt.2 | 19q13.42 | 87-396 | 653 | DEX0377_84.aa.2 |
| 431 | DEX0377_84.nt.3 | 19q13.42 | — | | |
| 432 | DEX0377_84.nt.4 | 19q13.42 | 1-1242 | 654 | DEX0377_84.aa.4 |
| 433 | DEX0377_84.nt.5 | 19q13.42 | 87-1752 | 655 | DEX0377_84.aa.5 |
| 434 | DEX0377_85.nt.1 | 10q11.22 | | 656 | DEX0377_85.aa.1 |
| 435 | DEX0377_85.nt.2 | 10q11.22 | — | | |
| 436 | DEX0377_85.nt.3 | 10q11.22 | 1-181 | 657 | DEX0377_85.aa.3 |
| 437 | DEX0377_86.nt.1 | 2p22.3 | | 658 | DEX0377_86.aa.1 |
| 438 | DEX0377_86.nt.2 | 2p22.3 | — | | |
| 439 | DEX0377_87.nt.1 | 11q22.1 | | 659 | DEX0377_87.aa.1 |
| 440 | DEX0377_87.nt.2 | 11q22.1 | — | | |
| 441 | DEX0377_88.nt.1 | 1q43 | | 660 | DEX0377_88.aa.1 |
| 442 | DEX0377_88.nt.2 | 1q43 | — | | |
| 443 | DEX0377_89.nt.1 | 12q13.11 | | 661 | DEX0377_89.aa.1 |
| 444 | DEX0377_90.nt.1 | 19q13.31 | | 662 | DEX0377_90.aa.1 |
| 445 | DEX0377_90.nt.2 | 19q13.31 | — | | |
| 446 | DEX0377_90.nt.3 | 19q13.31 | — | | |
| 447 | DEX0377_90.nt.4 | 19q13.31 | — | | |
| 448 | DEX0377_90.nt.5 | 19q13.31 | — | | |
| 449 | DEX0377_90.nt.6 | 19q13.31 | — | | |
| 450 | DEX0377_90.nt.7 | 19q13.31 | — | | |
| 451 | DEX0377_90.nt.8 | 19q13.31 | — | | |
| 452 | DEX0377_90.nt.9 | 19q13.31 | — | | |
| 453 | DEX0377_90.nt.10 | 19q13.31 | — | | |
| 454 | DEX0377_90.nt.11 | 19q13.31 | — | | |
| 455 | DEX0377_90.nt.12 | 19q13.31 | 1-324 | 663 | DEX0377_90.aa.12 |
| 456 | DEX0377_90.nt.13 | 19q13.31 | — | | |
| 457 | DEX0377_90.nt.14 | 19q13.31 | — | | |
| 458 | DEX0377_90.nt.15 | 19q13.31 | — | | |
| 459 | DEX0377_91.nt.1 | 17q23.2 | | 664 | DEX0377_91.aa.1 |
| 460 | DEX0377_91.nt.2 | 17q23.2 | | | |
| 461 | DEX0377_91.nt.3 | 17q23.2 | — | | |
| 462 | DEX0377_92.nt.1 | 19p13.2 | | | |
| 463 | DEX0377_93.nt.1 | 14q32.33 | | | |
| 464 | DEX0377_94.nt.1 | 14q22.1 | | | |
| 465 | DEX0377_95.nt.1 | 14q22.1 | | | |
| 466 | DEX0377_96.nt.1 | 14q22.1 | | | |
| 467 | DEX0377_97.nt.1 | 14q22.1 | | 665 | DEX0377_97.aa.1 |
| 468 | DEX0377_98.nt.1 | * | | | |
| 469 | DEX0377_99.nt.1 | *3q13.31 | | | |
| 470 | DEX0377_100.nt.1 | 12p13.33 | | 666 | DEX0377_100.aa.1 |
| 471 | DEX0377_101.nt.1 | 2p21 | | | |
| 472 | DEX0377_102.nt.1 | *16p11.2 | | | |

[0424] For the polypeptides of the invention, the following attributes were found, epitopes, post translational modifications, signal peptides and transmembrane domains. Antigenicity (Epitope) prediction was performed through the antigenic module in the EMBOSS package. Rice, P., EMBOSS: The European Molecular Biology Open Software Suite, Trends in Genetics 16(6): 276-277 (2000). The antigenic module predicts potentially antigenic regions of a protein sequence, using the method of Kolaskar and Tongaonkar. Kolaskar, AS and Tongaonkar, PC., A semi-empirical method for prediction of antigenic determinants on protein antigens, FEBS Letters 276: 172-174 (1990). Examples of post-translational modifications (PTMS) and other motifs of the ESPs of this invention are listed below. In addition, antibodies that specifically bind such post-translational modifications may be useful as a diagnostic or as therapeutic. The PTMs and other motifs were predicted by using the ProSite Dictionary of Proteins Sites and Patterns (Bairoch et al., Nucleic Acids Res. 25(1):217-221 (1997)), the following motifs, including PTMs, were predicted for the ESPs of the invention. The signal peptides were detected by using the SignalP 2.0, see Nielsen et al., Protein Engineering 12, 3-9 (1999). Prediction of transmembrane helices in proteins was performed by the application TMHMM 2.0, “currently the best performing transmembrane prediction program”, according to authors (Krogh et al., Journal of Molecular Biology, 305(3):567-580, (2001); Moller et al., Bioinformatics, 17(7):646-653, (2001); Sonnhammer, et al., A hidden Markov model for predicting transmembrane helices in protein sequences in Glasgow, et al. Ed. Proceedings of the Sixth International Conference on Intelligent Systems for Molecular Biology, pages 175-182, Menlo Park, Calif., 1998. AAAI Press. The PSORT II program may also be used to predict cellular localizations. Horton et al., Intelligent Systems for Molecular Biology 5: 147-152 (1997). The table below includes the following sequence annotations: Signal peptide presence; TM (number of membrane domain, topology in orientation and position); Amino acid location and antigenic index (location, AI score, length); PTM and other motifs (type, amino acid residue locations).

| | Signal | | | |
|---|---|---|---|---|
| SequenceID | P | TMHMM | Antigenicity | PTM |
| DEX0377_3.aa.22 | N | 0 -o | 224-237, 1.238; 287-311, 1.231; | Rnp_1 171-178; |
| | | | 1044-1071, 1.224; 780-795, 1.216; | Wd_Repeats 488-502, |
| | | | 1209-1255, 1.21; 819-835, 1.205; | 531-545; Amidation |
| | | | 1088-1100, 1.196; 1125-1149, 1.188; | 818-821, 852-855; |
| | | | 481-497, 1.184; 2018-2039, 1.173; | Asn_Glycosylation |
| | | | 106-128, 1.171; 50-93, 1.168; | 107-110, 484-487, 856-859, |
| | | | 364-379, 1.167; 624-638, 1.157; | 866-869; Camp_Phospho_Site |
| | | | 1364-1377, 1.154; 2005-2014, 1.154; | 740-743, 821-824, 933-936, |
| | | | 247-255, 1.147; 1740-1749, 1.141; | 972-975; Ck2_Phospho_Site |
| | | | 1950-1959, 1.141; 1670-1681, 1.14; | 109-112, 161-164, 250-253, |
| | | | 511-519, 1.139; 1381-1390, 1.137; | 339-342, 413-416, 465-468, |
| | | | 410-419, 1.133; 2049-2055, 1.129; | 466-469, 661-664, 676-679, |
| | | | 659-670, 1.128; 558-567, 1.12; | 700-703, 729-732, 777-780, |
| | | | 1262-1274, 1.119; 571-596, 1.118; | 858-861, 864-867, 876-879, |
| | | | 1443-1453, 1.113; 1507-1518, 1.112; | 886-889, 887-890, 900-903, |
| | | | 1626-1634, 1.11; 980-990, 1.107; | 904-907, 940-943, 941-944, |
| | | | 1177-1185, 1.107; 136-148, 1.106; | 942-945, 975-978; Myristyl |
| | | | 386-398, 1.105; 1188-1194, 1.105; | 3-8, 5-10, 7-12, 9-14, |
| | | | 1694-1702, 1.105; 676-682, 1.102; | 11-16, 103-108, 172-177, |
| | | | 1898-1906, 1.099; 1708-1719, 1.097; | 191-196, 251-256, 318-323, |
| | | | 643-652, 1.097; 25-41, 1.096; | 340-345, 383-388, 433-438, |
| | | | 169-176, 1.093; 1941-1948, 1.091; | 560-565, 575-580, 727-732, |
| | | | 1417-1431, 1.091; 1296-1303, 1.088; | 753-758, 758-763, 865-870, |
| | | | 1984-1990, 1.087; 996-1002, 1.086; | 883-888; Pkc_Phospho_Site |
| | | | 338-344, 1.086; 1818-1827, 1.083; | 53-55, 116-118, 161-163, |
| | | | 917-925, 1.083; 188-195, 1.083; | 270-272, 332-334, 354-356, |
| | | | 500-507, 1.081; 1284-1292, 1.08; | 358-360, 365-367, 415-417, |
| | | | 736-742, 1.08; 864-876, 1.078; | 438-440, 734-736, 777-779, |
| | | | 1579-1587, 1.073; 2226-2232, 1.071; | 828-830, 844-846, 858-860, |
| | | | 2270-2277, 1.068; 2153-2159, 1.066; | 871-873, 894-896, 909-911, |
| | | | 931-937, 1.066; 200-209, 1.065; | 930-932, 998-1000; Rgd 19-21; |
| | | | 1964-1976, 1.064; 315-322, 1.063; | Tyr_Phospho_Site 808-816; |
| | | | 444-451, 1.06; 263-269, 1.06; | Prokar_Lipoprotein |
| | | | 347-357, 1.057; 2252-2258, 1.055; | 584-594; |
| | | | 151-157, 1.053; 17-23, 1.048; | |
| | | | 1790-1796, 1.043; 2114-2120, 1.042; | |
| | | | 1112-1118, 1.04; 603-610, 1.039; | |
| | | | 1857-1863, 1.027 | |
| DEX0377_3.aa.23 | N | 0 -o | 106-128, 1.171; 50-93, 1.168; | Asn_Glycosylation |
| | | | 136-148, 1.106; 25-41, 1.096; | 107-110; Ck2_Phospho_Site |
| | | | 17-23, 1.048 | 109-112; Myristyl 3-8, |
| | | | | 5-10, 7-12, 9-14, 11-16, |
| | | | | 103-108; Pkc_Phospho_Site |
| | | | | 53-55, 116-118, 161-163; |
| | | | | Rgd 19-21; |
| DEX0377_3.aa.28 | N | 0 -o | 510-545, 1.242; 182-195, 1.238; | Rnp_1 129-136; |
| | | | 2290-2306, 1.235; 245-269, 1.231; | Wd_Repeats 446-460, |
| | | | 1105-1135, 1.224; 821-836, 1.216; | 572-586; Amidation |
| | | | 1273-1319, 1.21; 860-876, 1.205; | 859-862, 893-896; |
| | | | 1152-1164, 1.196; 1189-1213, 1.188; | Asn_Glycosylation 65-68, |
| | | | 439-455, 1.184; 2082-2103, 1.173; | 442-445, 477-480, 897-900, |
| | | | 64-86, 1.171; 8-51, 1.168; | 907-910; Camp_Phospho_Site |
| | | | 322-337, 1.167; 665-679, 1.157; | 781-784, 862-865, 974-977; |
| | | | 1428-1441, 1.154; 2069-2078, 1.154; | Ck2_Phospho_Site 67-70, |
| | | | 205-213, 1.147; 1804-1813, 1.141; | 119-122, 208-211, 297-300, |
| | | | 2014-2023, 1.141; 1734-1745, 1.14; | 371-374, 423-426, 424-427, |
| | | | 551-560, 1.139; 1445-1454, 1.137; | 479-482, 702-705, 717-720, |
| | | | 479-503, 1.134; 368-377, 1.133; | 741-744, 770-773, 818-821, |
| | | | 2113-2119, 1.129; 700-711, 1.128; | 899-902, 905-908, 917-920, |
| | | | 458-464, 1.12; 599-608, 1.12; | 927-930, 928-931, 941-944, |
| | | | 1326-1338, 1.119; 612-637, 1.118; | 945-948, 981-984, 982-985, |
| | | | 1507-1517, 1.113; 1571-1582, 1.112; | 983-986; Myristyl 61-66, |
| | | | 1690-1698, 1.11; 1021-1031, 1.107; | 130-135, 149-154, 209-214, |
| | | | 1241-1249, 1.107; 94-106, 1.106; | 276-281, 298-303, 341-346, |
| | | | 344-356, 1.105; 1252-1258, 1.105; | 391-396, 601-606, 616-621, |
| | | | 1758-1766, 1.105; 717-723, 1.102; | 768-773, 794-799, 799-804, |
| | | | 1962-1970, 1.099; 1772-1783, 1.097; | 906-911, 924-929; |
| | | | 684-693, 1.097; 127-134, 1.093; | Pkc_Phospho_Site 11-13, |
| | | | 2005-2012, 1.091; 1481-1495, 1.091; | 74-76, 119-121, 228-230, |
| | | | 1360-1367, 1.088; 2048-2054, 1.087; | 290-292, 312-314, 316-318, |
| | | | 1037-1043, 1.086; 296-302, 1.086; | 323-325, 373-375, 396-398, |
| | | | 1882-1891, 1.083; 958-966, 1.083; | 775-777, 818-820, 869-871, |
| | | | 146-153, 1.083; 1348-1356, 1.08; | 885-887, 899-901, 912-914, |
| | | | 777-783, 1.08; 905-917, 1.078; | 935-937, 950-952, 971-973; |
| | | | 1643-1651, 1.073; 2217-2223, 1.066; | Tyr_Phospho_Site 849-857; |
| | | | 972-978, 1.066; 158-167, 1.065; | Prokar_Lipoprotein |
| | | | 2028-2040, 1.064; 273-280, 1.063; | 625-635; |
| | | | 402-409, 1.06; 221-227, 1.06; | |
| | | | 305-315, 1.057; 109-115, 1.053; | |
| | | | 1854-1860, 1.043; 2178-2184, 1.042; | |
| | | | 1176-1182, 1.04; 644-651, 1.039; | |
| | | | 1921-1927, 1.027 | |
| DEX0377_3.aa.29 | N | 0 -o | 224-237, 1.238; 287-311, 1.231; | Rnp_1 171-178; |
| | | | 481-497, 1.184; 106-128, 1.171; | Wd_Repeats 488-502; |
| | | | 50-93, 1.168; 364-379, 1.167; | Asn_Glycosylation |
| | | | 247-255, 1.147; 410-419, 1.133; | 107-110, 484-487, 519-522; |
| | | | 500-506, 1.12; 136-148, 1.106; | Ck2_Phospho_Site 109-112, |
| | | | 386-398, 1.105; 25-41, 1.096; | 161-164, 250-253, 339-342, |
| | | | 169-176, 1.093; 338-344, 1.086; | 413-416, 465-468, 466-469; |
| | | | 188-195, 1.083; 200-209, 1.065; | Myristyl 3-8, 5-10, 7-12, |
| | | | 315-322, 1.063; 444-451, 1.06; | 9-14, 11-16, 103-108, |
| | | | 263-269, 1.06; 347-357, 1.057; | 172-177, 191-196, 251-256, |
| | | | 151-157, 1.053; 17-23, 1.048 | 318-323, 340-345, 383-388, |
| | | | | 433-438; Pkc_Phospho_Site |
| | | | | 53-55, 116-118, 161-163, |
| | | | | 270-272, 332-334, 354-356, |
| | | | | 358-360, 365-367, 415-417, |
| | | | | 438-440; Rgd 19-21; |
| DEX0377_3.aa.35 | N | 0 -o | 224-237, 1.238; 287-311, 1.231; | Rnp_1 171-178; |
| | | | 106-128, 1.171; 50-93, 1.168; | Asn_Glycosylation 107-110; |
| | | | 364-379, 1.167; 247-255, 1.147; | Ck2_Phospho_Site 109-112, |
| | | | 136-148, 1.106; 25-41, 1.096; | 161-164, 250-253, 339-342; |
| | | | 169-176, 1.093; 338-344, 1.086; | Myristyl 3-8, 5-10, 7-12, |
| | | | 188-195, 1.083; 200-209, 1.065; | 9-14, 11-16, 103-108, |
| | | | 315-322, 1.063; 263-269, 1.06; | 172-177, 191-196, 251-256, |
| | | | 347-357, 1.057; 151-157, 1.053; | 318-323, 340-345; |
| | | | 17-23, 1.048 | Pkc_Phospho_Site 53-55, |
| | | | | 116-118, 161-163, 270-272, |
| | | | | 332-334, 354-356, 358-360, |
| | | | | 365-367; Rgd 19-21; |
| DEX0377_3.aa.36 | N | 0 -o | 102-148, 1.21; 18-42, 1.188; | Ck2_Phospho_Site 15-18, |
| | | | 150-161, 1.13; 70-78, 1.107; | 51-54, 57-60, 81-84, |
| | | | 81-87, 1.105 | 101-104, 111-114; Myristyl |
| | | | | 24-29, 75-80; Pkc_Phospho_Site |
| | | | | 149-151; |
| DEX0377_3.aa.37 | N | 0 -o | 224-237, 1.238; 287-311, 1.231; | Rnp_1 171-178; |
| | | | 1044-1071, 1.224; 780-795, 1.216; | Wd_Repeats 488-502, |
| | | | 1209-1255, 1.21; 819-835, 1.205; | 531-545; Amidation |
| | | | 1088-1100, 1.196; 1125-1149, 1.188; | 818-821, 852-855; |
| | | | 481-497, 1.184; 2018-2039, 1.173; | Asn_Glycosylation |
| | | | 106-128, 1.171; 50-93, 1.168; | 107-110, 484-487, 856-859, |
| | | | 364-379, 1.167; 624-638, 1.157; | 866-869; Camp_Phospho_Site |
| | | | 1364-1377, 1.154; 2005-2014, 1.154; | 740-743, 821-824, 933-936, |
| | | | 247-255, 1.147; 1740-1749, 1.141; | 972-975; Ck2_Phospho_Site |
| | | | 1950-1959, 1.141; 1670-1681, 1.14; | 109-112, 161-164, 250-253, |
| | | | 511-519, 1.139; 1381-1390, 1.137; | 339-342, 413-416, 465-468, |
| | | | 410-419, 1.133; 2049-2055, 1.129; | 466-469, 661-664, 676-679, |
| | | | 659-670, 1.128; 2226-2237, 1.128; | 700-703, 729-732, 777-780, |
| | | | 558-567, 1.12; 1262-1274, 1.119; | 858-861, 864-867, 876-879, |
| | | | 571-596, 1.118; 1443-1453, 1.113; | 886-889, 887-890, 900-903, |
| | | | 1507-1518, 1.112; 1626-1634, 1.11; | 904-907, 940-943, 941-944, |
| | | | 2265-2283, 1.11; 980-990, 1.107; | 942-945, 975-978; |
| | | | 1177-1185, 1.107; 136-148, 1.106; | Myristyl 3-8, 5-10, 7-12, |
| | | | 386-398, 1.105; 1694-1702, 1.105; | 9-14, 11-16, 103-108, |
| | | | 1188-1194, 1.105; 676-682, 1.102; | 172-177, 191-196, 251-256, |
| | | | 1898-1906, 1.099; 2319-2326, 1.097; | 318-323, 340-345, 383-388, |
| | | | 1708-1719, 1.097; 643-652, 1.097; | 433-438, 560-565, 575-580, |
| | | | 25-41, 1.096; 169-176, 1.093; | 727-732, 753-758, 758-763, |
| | | | 1941-1948, 1.091; 1417-1431, 1.091; | 865-870, 883-888; |
| | | | 1296-1303, 1.088; 1984-1990, 1.087; | Pkc_Phospho_Site 53-55, |
| | | | 996-1002, 1.086; 338-344, 1.086; | 116-118, 161-163, 270-272, |
| | | | 917-925, 1.083; 1818-1827, 1.083; | 332-334, 354-356, 358-360, |
| | | | 188-195, 1.083; 500-507, 1.081; | 365-367, 415-417, 438-440, |
| | | | 1284-1292, 1.08; 736-742, 1.08; | 734-736, 777-779, 828-830, |
| | | | 864-876, 1.078; 1579-1587, 1.073; | 844-846, 858-860, 871-873, |
| | | | 2153-2159, 1.066; 931-937, 1.066; | 894-896, 909-911, 930-932, |
| | | | 200-209, 1.065; 1964-1976, 1.064; | 998-1000; Rgd 19-21; |
| | | | 315-322, 1.063; 444-451, 1.06; | Tyr_Phospho_Site 808-816; |
| | | | 263-269, 1.06; 347-357, 1.057; | Prokar_Lipoprotein |
| | | | 151-157, 1.053; 17-23, 1.048; | 584-594; |
| | | | 1790-1796, 1.043; 2114-2120, 1.042; | |
| | | | 1112-1118, 1.04; 603-610, 1.039; | |
| | | | 2253-2259, 1.033; 1857-1863, 1.027 | |
| DEX0377_3.aa.38 | N | 0 -o | 510-545, 1.242; 182-195, 1.238; | Rnp_1 129-136; |
| | | | 245-269, 1.231; 1105-1135, 1.224; | Wd_Repeats 446-460, |
| | | | 821-836, 1.216; 1273-1319, 1.21; | 572-586; Amidation |
| | | | 860-876, 1.205; 1152-1164, 1.196; | 859-862, 893-896; |
| | | | 1189-1213, 1.188; 439-455, 1.184; | Asn_Glycosylation 65-68, |
| | | | 2082-2103, 1.173; 64-86, 1.171; | 442-445, 477-480, 897-900, |
| | | | 8-51, 1.168; 322-337, 1.167; | 907-910; Camp_Phospho_Site |
| | | | 665-679, 1.157; 1428-1441, 1.154; | 781-784, 862-865, 974-977; |
| | | | 2069-2078, 1.154; 205-213, 1.147; | Ck2_Phospho_Site 67-70, |
| | | | 1804-1813, 1.141; 2014-2023, 1.141; | 119-122, 208-211, 297-300, |
| | | | 1734-1745, 1.14; 551-560, 1.139; | 371-374, 423-426, 424-427, |
| | | | 1445-1454, 1.137; 479-503, 1.134; | 479-482, 702-705, 717-720, |
| | | | 368-377, 1.133; 2113-2119, 1.129; | 741-744, 770-773, 818-821, |
| | | | 700-711, 1.128; 458-464, 1.12; | 899-902, 905-908, 917-920, |
| | | | 599-608, 1.12; 1326-1338, 1.119; | 927-930, 928-931, 941-944, |
| | | | 612-637, 1.118; 1507-1517, 1.113; | 945-948, 981-984, 982-985, |
| | | | 1571-1582, 1.112; 1690-1698, 1.11; | 983-986; Myristyl 61-66, |
| | | | 1021-1031, 1.107; 1241-1249, 1.107; | 130-135, 149-154, 209-214, |
| | | | 94-106, 1.106; 344-356, 1.105; | 276-281, 298-303, 341-346, |
| | | | 1252-1258, 1.105; 1758-1766, 1.105; | 391-396, 601-606, 616-621, |
| | | | 717-723, 1.102; 1962-1970, 1.099; | 768-773, 794-799, 799-804, |
| | | | 1772-1783, 1.097; 684-693, 1.097; | 906-911, 924-929; |
| | | | 127-134, 1.093; 2005-2012, 1.091; | Pkc_Phospho_Site 11-13, |
| | | | 1481-1495, 1.091; 1360-1367, 1.088; | 74-76, 119-121, 228-230, |
| | | | 2048-2054, 1.087 1037-1043, 1.086; | 290-292, 312-314, 316-318, |
| | | | 296-302, 1.086; 1882-1891, 1.083; | 323-325, 373-375, 396-398, |
| | | | 958-966, 1.083; 146-153, 1.083; | 775-777, 818-820, 869-871, |
| | | | 1348-1356, 1.08; 777-783, 1.08; | 885-887, 899-901, 912-914, |
| | | | 905-917, 1.078; 1643-1651, 1.073; | 935-937, 950-952, 971-973; |
| | | | 2290-2296, 1.071; 2334-2341, 1.068; | Tyr_Phospho_Site 849-857; |
| | | | 2217-2223, 1.066; 972-978, 1.066; | Prokar_Lipoprotein |
| | | | 158-167, 1.065; 2028-2040, 1.064; | 625-635; |
| | | | 273-280, 1.063; 402-409, 1.06; | |
| | | | 221-227, 1.06; 305-315, 1.057; | |
| | | | 2316-2322, 1.055; 109-115, 1.053; | |
| | | | 1854-1860, 1.043; 2178-2184, 1.042; | |
| | | | 1176-1182, 1.04; 644-651, 1.039; | |
| | | | 1921-1927, 1.027 | |
| DEX0377_3.aa.40 | N | 0 -o | 510-545, 1.242; 182-195, 1.238; | Rnp_1 129-136; |
| | | | 245-269, 1.231; 1105-1135, 1.224; | Wd_Repeats 446-460, |
| | | | 821-836, 1.216; 1273-1319, 1.21; | 572-586; Amidation |
| | | | 860-876, 1.205; 1152-1164, 1.196; | 859-862, 893-896; |
| | | | 1189-1213, 1.188; 439-455, 1.184; | Asn_Glycosylation 65-68, |
| | | | 64-86, 1.171; 8-51, 1.168; | 442-445, 477-480, 897-900, |
| | | | 322-337, 1.167; 665-679, 1.157; | 907-910; Camp_Phospho_Site |
| | | | 1428-1441, 1.154; 205-213, 1.147; | 781-784, 862-865, 974-977; |
| | | | 1804-1813, 1.141; 1734-1745, 1.14; | Ck2_Phospho_Site 67-70, |
| | | | 551-560, 1.139; 1445-1454, 1.137; | 119-122, 208-211, 297-300, |
| | | | 479-503, 1.134; 368-377, 1.133; | 371-374, 423-426, 424-427, |
| | | | 700-711, 1.128; 458-464, 1.12; | 479-482, 702-705, 717-720, |
| | | | 599-608, 1.12; 1326-1338, 1.119; | 741-744, 770-773, 818-821, |
| | | | 612-637, 1.118; 1507-1517, 1.113; | 899-902, 905-908, 917-920, |
| | | | 1571-1582, 1.112; 1690-1698, 1.11; | 927-930, 928-931, 941-944, |
| | | | 1021-1031, 1.107; 1241-1249, 1.107; | 945-948, 981-984, 982-985, |
| | | | 94-106, 1.106; 344-356, 1.105; | 983-986; Myristyl 61-66, |
| | | | 1252-1258, 1.105; 1758-1766, 1.105; | 130-135, 149-154, 209-214, |
| | | | 717-723, 1.102; 1962-1970, 1.099; | 276-281, 298-303, 341-346, |
| | | | 1772-1783, 1.097; 684-693, 1.097; | 391-396, 601-606, 616-621, |
| | | | 127-134, 1.093; 1481-1495, 1.091; | 768-773, 794-799, 799-804, |
| | | | 1360-1367, 1.088; 1037-1043, 1.086; | 906-911, 924-929; |
| | | | 296-302, 1.086; 1882-1891, 1.083; | Pkc_Phospho_Site 11-13, |
| | | | 958-966, 1.083; 146-153, 1.083; | 74-76, 119-121, 228-230, |
| | | | 1348-1356, 1.08; 777-783, 1.08; | 290-292, 312-314, 316-318, |
| | | | 905-917, 1.078; 1643-1651, 1.073; | 323-325, 373-375, 396-398, |
| | | | 972-978, 1.066; 158-167, 1.065; | 775-777, 818-820, 869-871, |
| | | | 273-280, 1.063; 402-409, 1.06; | 885-887, 899-901, 912-914, |
| | | | 221-227, 1.06; 305-315, 1.057; | 935-937, 950-952, 971-973; |
| | | | 109-115, 1.053; 1854-1860, 1.043; | Tyr_Phospho_Site 849-857; |
| | | | 1176-1182, 1.04; 644-651, 1.039; | Prokar_Lipoprotein |
| | | | 1921-1927, 1.027 | 625-635; |
| DEX0377_7.aa.3 | N | 0 -i | 31-41, 1.118; 65-88, 1.116; | Ck2_Phospho_Site 62-65, |
| | | | 13-23, 1.11; 98-105, 1.077 | 109-112; Myristyl 38-43, |
| | | | | 50-55; Pkc_Phospho_Site |
| | | | | 64-66, 95-97; |
| DEX0377_8.aa.2 | N | 0 -o | 90-98, 1.195; 4-13, 1.149; | Asn_Glycosylation 41-44; |
| | | | 26-35, 1.102; 109-125, 1.074; | Ck2_Phospho_Site |
| | | | 70-76, 1.058 | 64-67, 129-132; |
| DEX0377_8.aa.3 | N | 0 -o | 1543-1575, 1.31; 779-790, 1.281; | Amidation 853-856, |
| | | | 907-932, 1.272; 1502-1537, 1.269; | 998-1001; Asn_Glycosylation |
| | | | 1305-1316, 1.247; 1204-1257, 1.242; | 256-259, 545-548, 663-666; |
| | | | 443-466, 1.228; 1074-1108, 1.222; | Camp_Phospho_Site 35-38, |
| | | | 692-711, 1.214; 855-894, 1.202; | 129-132, 130-133, 168-171, |
| | | | 1483-1491, 1.195; 1047-1058, 1.189; | 716-719; Ck2_Phospho_Site |
| | | | 812-841, 1.185; 1320-1357, 1.184; | 24-27, 135-138, 176-179, |
| | | | 473-500, 1.182; 1114-1144, 1.18; | 182-185, 188-191, 190-193, |
| | | | 938-971, 1.177; 48-57, 1.177; | 252-255, 391-394, 425-428, |
| | | | 743-775, 1.172; 552-579, 1.171; | 471-474, 554-557, 584-587, |
| | | | 69-80, 1.168; 609-641, 1.167; | 682-685, 706-709, 753-756, |
| | | | 1263-1290, 1.165; 409-419, 1.161; | 903-906, 904-907; Myristyl |
| | | | 295-313, 1.159; 431-438, 1.158; | 106-111, 194-199, 202-207, |
| | | | 1015-1027, 1.155; 1032-1045, 1.154; | 223-228, 237-242, 238-243, |
| | | | 1170-1190, 1.15; 164-172, 1.138; | 279-284, 300-305, 364-369, |
| | | | 394-401, 1.135; 1591-1601, 1.134; | 455-460, 488-493, 558-563, |
| | | | 140-151, 1.129; 584-591, 1.129; | 562-567, 600-605, 604-609, |
| | | | 1148-1163, 1.127; 981-995, 1.125; | 735-740, 763-768, 802-807, |
| | | | 646-652, 1.123; 511-527, 1.123; | 817-822, 945-950, 994-999; |
| | | | 676-689, 1.12; 329-338, 1.118; | Pkc_Phospho_Site 29-31, |
| | | | 33-43, 1.116; 662-670, 1.114; | 71-73, 167-169, 304-306, |
| | | | 379-387, 1.114; 1386-1392, 1.108; | 308-310, 317-319, 384-386, |
| | | | 1396-1406, 1.107; 4-17, 1.105; | 412-414, 471-473, 554-556, |
| | | | 732-738, 1.105; 1375-1384, 1.105; | 666-668, 768-770, 853-855, |
| | | | 1419-1428, 1.102; 722-730, 1.1; | 998-1000; Prokar_Lipoprotein |
| | | | 593-603, 1.098; 1363-1371, 1.096; | 446-456, 477-487, 571-581; |
| | | | 357-364, 1.095; 94-107, 1.094; | |
| | | | 237-246, 1.086; 321-327, 1.086; | |
| | | | 544-550, 1.082; 255-261, 1.08; | |
| | | | 367-373, 1.079; 264-272, 1.076; | |
| | | | 111-117, 1.073; 1463-1469, 1.058; | |
| | | | 212-218, 1.056; 1195-1201, 1.055 | |
| DEX0377_8.aa.4 | N | 0 -o | 1487-1519, 1.31; 723-734, 1.281; | Amidation 797-800, |
| | | | 851-876, 1.272; 1446-1481, 1.269; | 942-945; Asn_Glycosylation |
| | | | 1249-1260, 1.247; 1148-1201, 1.242; | 200-203, 489-492, 607-610; |
| | | | 387-410, 1.228; 1018-1052, 1.222; | Camp_Phospho_Site 35-38, |
| | | | 636-655, 1.214; 799-838, 1.202; | 73-76, 74-77, 112-115, |
| | | | 1427-1435, 1.195; 991-1002, 1.189; | 660-663; Ck2_Phospho_Site |
| | | | 756-785, 1.185; 1264-1301, 1.184; | 24-27, 79-82, 120-123, |
| | | | 417-444, 1.182; 1058-1088, 1.18; | 126-129, 132-135, 134-137, |
| | | | 882-915, 1.177; 687-719, 1.172; | 196-199, 335-338, 369-372, |
| | | | 496-523, 1.171; 553-585, 1.167; | 415-418, 498-501, 528-531, |
| | | | 1207-1234, 1.165; 353-363, 1.161; | 626-629, 650-653, 697-700, |
| | | | 239-257, 1.159; 375-382, 1.158; | 847-850, 848-851, 950-953, |
| | | | 959-971, 1.155; 976-989, 1.154; | 979-982; Myristyl 138-143, |
| | | | 1114-1134, 1.15; 108-116, 1.138; | 146-151, 167-172, 181-186, |
| | | | 338-345, 1.135; 1535-1545, 1.134; | 182-187, 223-228, 244-249, |
| | | | 84-95, 1.129; 528-535, 1.129; | 308-313, 399-404, 432-437, |
| | | | 1092-1107, 1.127; 925-939, 1.125; | 502-507, 506-511, 544-549, |
| | | | 590-596, 1.123; 455-471, 1.123; | 548-553, 679-684, 707-712, |
| | | | 620-633, 1.12; 273-282, 1.118; | 746-751, 761-766, 889-894, |
| | | | 33-51, 1.116; 606-614, 1.114; | 938-943, 993-998; |
| | | | 323-331, 1.114; 1330-1336, 1.108; | Pkc_Phospho_Site 29-31, |
| | | | 1340-1350, 1.107; 676-682, 1.105; | 111-113, 248-250, 252-254, |
| | | | 4-17, 1.105; 1319-1328, 1.105; | 261-263, 328-330, 356-358, |
| | | | 1363-1372, 1.102; 666-674, 1.1; | 415-417, 498-500, 610-612, |
| | | | 537-547, 1.098; 1307-1315, 1.096; | 712-714, 797-799, 942-944, |
| | | | 301-308, 1.095; 181-190, 1.086; | 950-952; Prokar_Lipoprotein |
| | | | 265-271, 1.086; 488-494, 1.082; | 390-400, 421-431, 515-525; |
| | | | 199-205, 1.08; 311-317, 1.079; | |
| | | | 208-216, 1.076; 55-61, 1.073; | |
| | | | 1407-1413, 1.058; 156-162, 1.056; | |
| | | | 1139-1145, 1.055 | |
| DEX0377_8.aa.6 | N | 0 -o | 1359-1391, 1.31; 427-438, 1.281; | Amidation 501-504, |
| | | | 721-748, 1.272; 1318-1353, 1.269; | 814-817; Asn_Glycosylation |
| | | | 1121-1132, 1.247; 1020-1073, 1.242; | 193-196, 311-314; |
| | | | 91-114, 1.228; 890-924, 1.222; | Camp_Phospho_Site 364-367; |
| | | | 340-359, 1.214; 503-542, 1.202; | Ck2_Phospho_Site 39-42, |
| | | | 555-566, 1.201; 650-673, 1.197; | 73-76, 119-122, 202-205, |
| | | | 1299-1307, 1.195; 677-716, 1.19; | 232-235, 330-333, 354-357, |
| | | | 863-874, 1.189; 460-489, 1.185; | 401-404, 551-554, 552-555, |
| | | | 1136-1173, 1.184; 121-148, 1.182; | 619-622, 676-679, 822-825, |
| | | | 930-960, 1.18; 754-787, 1.177; | 851-854; Myristyl 12-17, |
| | | | 391-423, 1.172; 200-227, 1.171; | 103-108, 136-141, 206-211, |
| | | | 257-289, 1.167; 1079-1106, 1.165; | 210-215, 248-253, 252-257, |
| | | | 57-67, 1.161; 79-86, 1.158; | 383-388, 411-416, 450-455, |
| | | | 831-843, 1.155; 569-594, 1.155; | 465-470, 761-766, 810-815, |
| | | | 848-861, 1.154; 634-644, 1.152; | 865-870, 915-920; |
| | | | 986-1006, 1.15; 42-49, 1.135; | Pkc_Phospho_Site 32-34, |
| | | | 1407-1417, 1.134; 597-613, 1.132; | 60-62, 119-121, 202-204, |
| | | | 232-239, 1.129; 964-979, 1.127; | 314-316, 416-418, 501-503, |
| | | | 797-811, 1.125; 294-300, 1.123; | 681-683, 814-816, 822-824, |
| | | | 159-175, 1.123; 324-337, 1.12; | 925-927, 940-942; |
| | | | 625-632, 1.119; 310-318, 1.114; | Crystallin_Betagamma |
| | | | 27-35, 1.114; 1202-1208, 1.108; | 910-925; Prokar_Lipoprotein |
| | | | 1212-1222, 1.107; 380-386, 1.105; | 94-104, 125-135, 219-229; |
| | | | 1191-1200, 1.105; 1235-1244, 1.102; | |
| | | | 370-378, 1.1; 241-251, 1.098; | |
| | | | 1179-1187, 1.096; 5-12, 1.095; | |
| | | | 192-198, 1.082; 15-21, 1.079; | |
| | | | 1279-1285, 1.058; 1011-1017, 1.055 | |
| DEX0377_8.aa.7 | N | 0 -o | 1254-1286, 1.31; 322-333, 1.281; | Amidation 396-399, |
| | | | 616-643, 1.272; 1213-1248, 1.269; | 709-712; Asn_Glycosylation |
| | | | 1016-1027, 1.247; 915-968, 1.242; | 88-91, 206-209; |
| | | | 464-489, 1.231; 785-819, 1.222; | Camp_Phospho_Site 259-262; |
| | | | 235-254, 1.214; 398-437, 1.202; | Ck2_Phospho_Site 97-100, |
| | | | 450-461, 1.201; 545-568, 1.197; | 127-130, 225-228, 249-252, |
| | | | 1194-1202, 1.195; 572-611, 1.19; | 296-299, 446-449, 447-450, |
| | | | 758-769, 1.189; 355-384, 1.185; | 514-517, 571-574, 717-720, |
| | | | 1031-1068, 1.184; 16-43, 1.182; | 746-749, 972-975, 998-1001; |
| | | | 825-855, 1.18; 649-682, 1.177; | Myristyl 31-36, 101-106, |
| | | | 286-318, 1.172; 95-122, 1.171; | 105-110, 143-148, 147-152, |
| | | | 152-184, 1.167; 974-1001, 1.165; | 278-283, 306-311, 345-350, |
| | | | 726-738, 1.155; 743-756, 1.154; | 360-365, 656-661, 705-710, |
| | | | 529-539, 1.152; 881-901, 1.15; | 760-765, 810-815, 909-914, |
| | | | 1302-1312, 1.134; 492-508, 1.132; | 913-918; Pkc_Phospho_Site |
| | | | 127-134, 1.129; 4-11, 1.129; | 3-5, 97-99, 209-211, |
| | | | 859-874, 1.127; 692-706, 1.125; | 311-313, 396-398, 576-578, |
| | | | 189-195, 1.123; 54-70, 1.123; | 709-711, 717-719, 820-822, |
| | | | 219-232, 1.12; 520-527, 1.119; | 835-837, 927-929; |
| | | | 205-213, 1.114; 1097-1103, 1.108; | Crystallin_Betagamma |
| | | | 1107-1117, 1.107; 275-281, 1.105; | 805-820; Prokar_Lipoprotein |
| | | | 1086-1095, 1.105; 1130-1139, 1.102; | 20-30, 114-124; |
| | | | 265-273, 1.1; 136-146, 1.098; | |
| | | | 1074-1082, 1.096; 87-93, 1.082; | |
| | | | 1174-1180, 1.058; 906-912, 1.055 | |
| DEX0377_8.aa.8 | N | 0 -o | 1105-1137, 1.31; 173-184, 1.281; | Amidation 247-250, |
| | | | 467-494, 1.272; 1064-1099, 1.269; | 560-563; Asn_Glycosylation |
| | | | 867-878, 1.247; 766-819, 1.242; | 57-60, 996-999; |
| | | | 315-340, 1.231; 636-670, 1.222; | Camp_Phospho_Site |
| | | | 86-105, 1.214; 249-288, 1.202; | 110-113; Ck2_Phospho_Site |
| | | | 301-312, 1.201; 396-419, 1.197; | 76-79, 100-103, 147-150, |
| | | | 1045-1053, 1.195; 423-462, 1.19; | 297-300, 298-301, 365-368, |
| | | | 609-620, 1.189; 206-235, 1.185; | 422-425, 568-571, 597-600, |
| | | | 882-919, 1.184; 676-706, 1.18; | 823-826, 849-852, 860-863, |
| | | | 500-533, 1.177; 137-169, 1.172; | 926-929; Myristyl 129-134, |
| | | | 4-35, 1.167; 825-852, 1.165; | 157-162, 196-201, 211-216, |
| | | | 577-589, 1.155; 594-607, 1.154; | 507-512, 556-561, 611-616, |
| | | | 380-390, 1.152; 732-752, 1.15; | 661-666, 760-765, 764-769, |
| | | | 1153-1163, 1.134; 343-359, 1.132; | 869-874, 913-918, 951-956; |
| | | | 710-725, 1.127; 543-557, 1.125; | Pkc_Phospho_Site 60-62, |
| | | | 40-46, 1.123; 70-83, 1.12; | 162-164, 247-249, 427-429, |
| | | | 371-378, 1.119; 56-64, 1.114; | 560-562, 568-570, 671-673, |
| | | | 948-954, 1.108; 958-968, 1.107; | 686-688, 778-780, 864-866, |
| | | | 126-132, 1.105; 937-946, 1.105; | 961-963; |
| | | | 981-990, 1.102; 116-124, 1.1; | Crystallin_Betagamma |
| | | | 925-933, 1.096; 1025-1031, 1.058; | 656-671; |
| | | | 757-763, 1.055 | |
| DEX0377_8.aa.9 | N | 0 -o | 525-557, 1.31; 484-519, 1.269; | Asn_Glycosylation |
| | | | 6-27, 1.254; 287-298, 1.247; | 416-419; Ck2_Phospho_Site |
| | | | 186-239, 1.242; 56-90, 1.222; | 243-246, 269-272, 280-283, |
| | | | 465-473, 1.195; 29-40, 1.189; | 346-349, 439-442, 504-507, |
| | | | 302-339, 1.184; 96-126, 1.18; | 526-529, 564-567; Myristyl |
| | | | 245-272, 1.165; 152-172, 1.15; | 31-36, 81-86, 180-185, |
| | | | 573-583, 1.134; 130-145, 1.127; | 184-189, 289-294, 333-338, |
| | | | 368-374, 1.108; 378-388, 1.107; | 371-376; Pkc_Phospho_Site |
| | | | 357-366, 1.105; 401-410, 1.102; | 91-93, 106-108, 198-200, |
| | | | 345-353, 1.096; 445-451, 1.058; | 284-286, 381-383; |
| | | | 177-183, 1.055 | Crystallin_Betagamma |
| | | | | 76-91; |
| DEX0377_8.aa.10 | N | 0 -o | 1732-1764, 1.31; 779-790, 1.281; | Amidation 853-856; |
| | | | 1073-1100, 1.272; 1691-1726, 1.269; | Asn_Glycosylation |
| | | | 1473-1484, 1.247; 1372-1425, 1.242; | 256-259, 545-548, 663-666; |
| | | | 921-946, 1.231; 443-466, 1.228; | Camp_Phospho_Site 35-38, |
| | | | 1242-1276, 1.222; 692-711, 1.214; | 129-132, 130-133, 168-171, |
| | | | 855-894, 1.202; 907-918, 1.201; | 716-719; Ck2_Phospho_Site |
| | | | 1002-1025, 1.197; 1672-1680, 1.195; | 24-27, 135-138, 176-179, |
| | | | 1029-1068, 1.194; 1215-1226, 1.189; | 182-185, 188-191, 190-193, |
| | | | 812-841, 1.185; 1488-1525, 1.184; | 252-255, 391-394, 425-428, |
| | | | 473-500, 1.182; 1282-1312, 1.18; | 471-474, 554-557, 584-587, |
| | | | 1106-1139, 1.177; 48-57, 1.177; | 682-685, 706-709, 753-756, |
| | | | 743-775, 1.172; 552-579, 1.171; | 903-906, 904-907, 971-974; |
| | | | 69-80, 1.168; 609-641, 1.167; | Myristyl 106-111, 194-199, |
| | | | 1431-1458, 1.165; 409-419, 1.161; | 202-207, 223-228, 237-242, |
| | | | 295-313, 1.159; 431-438, 1.158; | 238-243, 279-284, 300-305, |
| | | | 1183-1195, 1.155; 1200-1213, 1.154; | 364-369, 455-460, 488-493, |
| | | | 986-996, 1.152; 1338-1358, 1.15; | 558-563, 562-567, 600-605, |
| | | | 164-172, 1.138; 394-401, 1.135; | 604-609, 735-740, 763-768, |
| | | | 1780-1790, 1.134; 949-965, 1.132; | 802-807, 817-822; |
| | | | 140-151, 1.129; 584-591, 1.129; | Pkc_Phospho_Site 29-31, |
| | | | 1316-1331, 1.127; 1149-1163, 1.125; | 71-73, 167-169, 304-306, |
| | | | 646-652, 1.123; 511-527, 1.123; | 308-310, 317-319, 384-386, |
| | | | 676-689, 1.12; 1658-1668, 1.12; | 412-414, 471-473, 554-556, |
| | | | 977-984, 1.119; 329-338, 1.118; | 666-668, 768-770, 853-855; |
| | | | 33-43, 1.116; 662-670, 1.114; | Prokar_Lipoprotein |
| | | | 379-387, 1.114; 1554-1560, 1.108; | 446-456, 477-487, 571-581; |
| | | | 1564-1574, 1.107; 4-17, 1.105; | |
| | | | 732-738, 1.105; 1543-1552, 1.105; | |
| | | | 1587-1596, 1.102; 722-730, 1.1; | |
| | | | 593-603, 1.098; 1531-1539, 1.096; | |
| | | | 357-364, 1.095; 94-107, 1.094; | |
| | | | 237-246, 1.086; 321-327, 1.086; | |
| | | | 544-550, 1.082; 255-261, 1.08; | |
| | | | 367-373, 1.079; 264-272, 1.076; | |
| | | | 111-117, 1.073; 1631-1637, 1.058; | |
| | | | 212-218, 1.056; 1363-1369, 1.055 | |
| DEX0377_8.aa.11 | N | 0 -o | 1721-1753, 1.31; 779-790, 1.281; | Amidation 853-856; |
| | | | 1073-1100, 1.272; 1680-1715, 1.269; | Asn_Glycosylation 256-259, |
| | | | 1473-1484, 1.247; 1372-1425, 1.242; | 545-548, 663-666; |
| | | | 921-946, 1.231; 443-466, 1.228; | Camp_Phospho_Site 35-38, |
| | | | 1242-1276, 1.222; 692-711, 1.214; | 129-132, 130-133, 168-171, |
| | | | 855-894, 1.202; 907-918, 1.201; | 716-719; Ck2_Phospho_Site |
| | | | 1002-1025, 1.197; 1661-1669, 1.195; | 24-27, 135-138, 176-179, |
| | | | 1029-1068, 1.194; 1215-1226, 1.189; | 182-185, 188-191, 190-193, |
| | | | 812-841, 1.185; 1488-1531, 1.184; | 252-255, 391-394, 425-428, |
| | | | 473-500, 1.182; 1282-1312, 1.18; | 471-474, 554-557, 584-587, |
| | | | 1106-1139, 1.177; 48-57, 1.177; | 682-685, 706-709, 753-756, |
| | | | 743-775, 1.172; 552-579, 1.171; | 903-906, 904-907, 971-974; |
| | | | 69-80, 1.168; 609-641, 1.167; | Myristyl 106-111, 194-199, |
| | | | 1431-1458, 1.165; 409-419, 1.161; | 202-207, 223-228, 237-242, |
| | | | 295-313, 1.159; 431-438, 1.158; | 238-243, 279-284, 300-305, |
| | | | 1183-1195, 1.155; 1200-1213, 1.154; | 364-369, 455-460, 488-493, |
| | | | 986-996, 1.152; 1338-1358, 1.15; | 558-563, 562-567, 600-605, |
| | | | 164-172, 1.138; 394-401, 1.135; | 604-609, 735-740, 763-768, |
| | | | 1769-1779, 1.134; 949-965, 1.132; | 802-807, 817-822; |
| | | | 140-151, 1.129; 584-591, 1.129; | Pkc_Phospho_Site 29-31, |
| | | | 1316-1331, 1.127; 1149-1163, 1.125; | 71-73, 167-169, 304-306, |
| | | | 646-652, 1.123; 511-527, 1.123; | 308-310, 317-319, 384-386, |
| | | | 676-689, 1.12; 977-984, 1.119; | 412-414, 471-473, 554-556, |
| | | | 329-338, 1.118; 33-43, 1.116; | 666-668, 768-770, 853-855; |
| | | | 662-670, 1.114; 379-387, 1.114; | Prokar_Lipoprotein |
| | | | 1564-1570, 1.108; 1574-1584, 1.107; | 446-456, 477-487, 571-581; |
| | | | 732-738, 1.105; 4-17, 1.105; | |
| | | | 1553-1562, 1.105; 1597-1606, 1.102; | |
| | | | 722-730, 1.1; 593-603, 1.098; | |
| | | | 1541-1549, 1.096; 357-364, 1.095; | |
| | | | 94-107, 1.094; 237-246, 1.086; | |
| | | | 321-327, 1.086; 544-550, 1.082; | |
| | | | 255-261, 1.08; 367-373, 1.079; | |
| | | | 264-272, 1.076; 111-117, 1.073; | |
| | | | 1641-1647, 1.058; 212-218, 1.056; | |
| | | | 1363-1369, 1.055 | |
| DEX0377_8.aa.12 | N | 0 -o | 779-790, 1.281; 1073-1100, 1.272; | Amidation 853-856; |
| | | | 1473-1484, 1.247; 1372-1425, 1.242; | Asn_Glycosylation 256-259, |
| | | | 921-946, 1.231; 443-466, 1.228; | 545-548, 663-666; |
| | | | 1242-1276, 1.222; 692-711, 1.214; | Camp_Phospho_Site 35-38, |
| | | | 855-894, 1.202; 907-918, 1.201; | 129-132, 130-133, 168-171, |
| | | | 1002-1025, 1.197; 1651-1659, 1.195; | 716-719; Ck2_Phospho_Site |
| | | | 1029-1068, 1.194; 1215-1226, 1.189; | 24-27, 135-138, 176-179, |
| | | | 812-841, 1.185; 1488-1525, 1.184; | 182-185, 188-191, 190-193, |
| | | | 473-500, 1.182; 1282-1312, 1.18; | 252-255, 391-394, 425-428, |
| | | | 1106-1139, 1.177; 48-57, 1.177; | 471-474, 554-557, 584-587, |
| | | | 743-775, 1.172; 552-579, 1.171; | 682-685, 706-709, 753-756, |
| | | | 69-80, 1.168; 609-641, 1.167; | 903-906, 904-907, 971-974; |
| | | | 1431-1458, 1.165; 409-419, 1.161; | Myristyl 106-111, 194-199, |
| | | | 295-313, 1.159; 431-438, 1.158; | 202-207, 223-228, 237-242, |
| | | | 1183-1195, 1.155; 1200-1213, 1.154; | 238-243, 279-284, 300-305, |
| | | | 986-996, 1.152; 1338-1358, 1.15; | 364-369, 455-460, 488-493, |
| | | | 164-172, 1.138; 394-401, 1.135; | 558-563, 562-567, 600-605, |
| | | | 949-965, 1.132; 140-151, 1.129; | 604-609, 735-740, 763-768, |
| | | | 584-591, 1.129; 1316-1331, 1.127; | 802-807, 817-822; |
| | | | 1149-1163, 1.125; 646-652, 1.123; | Pkc_Phospho_Site |
| | | | 511-527, 1.123; 676-689, 1.12; | 29-31, 71-73, 167-169, |
| | | | 977-984, 1.119; 329-338, 1.118; | 304-306, 308-310, 317-319, |
| | | | 33-43, 1.116; 662-670, 1.114; | 384-386, 412-414, 471-473, |
| | | | 379-387, 1.114; 1554-1560, 1.108; | 554-556, 666-668, 768-770, |
| | | | 1564-1574, 1.107; 4-17, 1.105; | 853-855; Prokar_Lipoprotein |
| | | | 732-738, 1.105; 1543-1552, 1.105; | 446-456, 477-487, 571-581; |
| | | | 1587-1596, 1.102; 722-730, 1.1; | |
| | | | 593-603, 1.098; 1531-1539, 1.096; | |
| | | | 357-364, 1.095; 94-107, 1.094; | |
| | | | 237-246, 1.086; 321-327, 1.086; | |
| | | | 1670-1686, 1.086; 544-550, 1.082; | |
| | | | 255-261, 1.08; 367-373, 1.079; | |
| | | | 264-272, 1.076; 111-117, 1.073; | |
| | | | 1631-1637, 1.058; 212-218, 1.056; | |
| | | | 1363-1369, 1.055 | |
| DEX0377_8.aa.13 | N | 0 -o | 779-790, 1.281; 443-466, 1.228; | Amidation 853-856; |
| | | | 692-711, 1.214; 855-894, 1.202; | Asn_Glycosylation |
| | | | 907-918, 1.201; 812-841, 1.185; | 256-259, 545-548, 663-666; |
| | | | 473-500, 1.182; 48-57, 1.177; | Camp_Phospho_Site 35-38, |
| | | | 743-775, 1.172; 552-579, 1.171; | 129-132, 130-133, 168-171, |
| | | | 69-80, 1.168; 609-641, 1.167; | 716-719; Ck2_Phospho_Site |
| | | | 409-419, 1.161; 295-313, 1.159; | 24-27, 135-138, 176-179, |
| | | | 431-438, 1.158; 164-172, 1.138; | 182-185, 188-191, 190-193, |
| | | | 394-401, 1.135; 921-934, 1.131; | 252-255, 391-394, 425-428, |
| | | | 140-151, 1.129; 584-591, 1.129; | 471-474, 554-557, 584-587, |
| | | | 646-652, 1.123; 511-527, 1.123; | 682-685, 706-709, 753-756, |
| | | | 676-689, 1.12; 329-338, 1.118; | 903-906, 904-907; Myristyl |
| | | | 33-43, 1.116; 662-670, 1.114; | 106-111, 194-199, 202-207, |
| | | | 379-387, 1.114; 732-738, 1.105; | 223-228, 237-242, 238-243, |
| | | | 4-17, 1.105; 722-730, 1.1; | 279-284, 300-305, 364-369, |
| | | | 593-603, 1.098; 357-364, 1.095; | 455-460, 488-493, 558-563, |
| | | | 94-107, 1.094; 237-246, 1.086; | 562-567, 600-605, 604-609, |
| | | | 321-327, 1.086; 544-550, 1.082; | 735-740, 763-768, 802-807, |
| | | | 255-261, 1.08; 367-373, 1.079; | 817-822; Pkc_Phospho_Site |
| | | | 264-272, 1.076; 111-117, 1.073; | 29-31, 71-73, 167-169, |
| | | | 212-218, 1.056 | 304-306, 308-310, 317-319, |
| | | | | 384-386, 412-414, 471-473, |
| | | | | 554-556, 666-668, 768-770, |
| | | | | 853-855; Prokar_Lipoprotein |
| | | | | 446-456, 477-487, 571-581; |
| DEX0377_8.aa.14 | N | 0 -o | 16-40, 1.177; 4-11, 1.106; | Ck2_Phospho_Site 16-19; |
| | | | 53-67, 1.095 | Myristyl 54-59; |
| | | | | Pkc_Phospho_Site 5-7, |
| | | | | 15-17; |
| | | | | Prokar_Lipoprotein 52-62; |
| DEX0377_8.aa.16 | N | 0 -o | 1711-1743, 1.31; 779-790, 1.281; | Amidation 853-856; |
| | | | 1073-1100, 1.272; 1670-1705, 1.269; | Asn_Glycosylation 256-259, |
| | | | 1473-1484, 1.247; 1372-1425, 1.242; | 545-548, 663-666; |
| | | | 921-946, 1.231; 443-466, 1.228; | Camp_Phospho_Site 35-38, |
| | | | 1242-1276, 1.222; 692-711, 1.214; | 129-132, 130-133, 168-171, |
| | | | 855-894, 1.202; 907-918, 1.201; | 716-719; Ck2_Phospho_Site |
| | | | 1002-1025, 1.197; 1651-1659, 1.195; | 24-27, 135-138, 176-179, |
| | | | 1029-1068, 1.194; 1215-1226, 1.189; | 182-185, 188-191, 190-193, |
| | | | 812-841, 1.185; 1488-1525, 1.184; | 252-255, 391-394, 425-428, |
| | | | 473-500, 1.182; 1282-1312, 1.18; | 471-474, 554-557, 584-587, |
| | | | 1106-1139, 1.177; 48-57, 1.177; | 682-685, 706-709, 753-756, |
| | | | 743-775, 1.172; 552-579, 1.171; | 903-906, 904-907, 971-974; |
| | | | 69-80, 1.168; 609-641, 1.167; | Myristyl 106-111, 194-199, |
| | | | 1431-1458, 1.165; 409-419, 1.161; | 202-207, 223-228, 237-242, |
| | | | 295-313, 1.159; 431-438, 1.158; | 238-243, 279-284, 300-305, |
| | | | 1183-1195, 1.155; 1200-1213, 1.154; | 364-369, 455-460, 488-493, |
| | | | 986-996, 1.152; 1338-1358, 1.15; | 558-563, 562-567, 600-605, |
| | | | 164-172, 1.138; 394-401, 1.135; | 604-609, 735-740, 763-768, |
| | | | 1759-1769, 1.134; 949-965, 1.132; | 802-807, 817-822; |
| | | | 140-151, 1.129; 584-591, 1.129; | Pkc_Phospho_Site 29-31, |
| | | | 1316-1331, 1.127; 1149-1163, 1.125; | 71-73, 167-169, 304-306, |
| | | | 646-652, 1.123; 511-527, 1.123; | 308-310, 317-319, 384-386, |
| | | | 676-689, 1.12; 977-984, 1.119; | 412-414, 471-473, 554-556, |
| | | | 329-338, 1.118; 33-43, 1.116; | 666-668, 768-770, 853-855; |
| | | | 662-670, 1.114; 379-387, 1.114; | Prokar_Lipoprotein |
| | | | 1554-1560, 1.108; 1564-1574, 1.107; | 446-456, 477-487, 571-581; |
| | | | 732-738, 1.105; 4-17, 1.105; | |
| | | | 1543-1552, 1.105; 1587-1596, 1.102; | |
| | | | 722-730, 1.1; 593-603, 1.098; | |
| | | | 1531-1539, 1.096; 357-364, 1.095; | |
| | | | 94-107, 1.094; 237-246, 1.086; | |
| | | | 321-327, 1.086; 544-550, 1.082; | |
| | | | 255-261, 1.08; 367-373, 1.079; | |
| | | | 264-272, 1.076; 111-117, 1.073; | |
| | | | 1631-1637, 1.058; 212-218, 1.056; | |
| | | | 1363-1369, 1.055 | |
| DEX0377_8.aa.19 | N | 0 -o | 32-84, 1.235; 92-117, 1.171; | Ck2_Phospho_Site 90-93; |
| | | | 18-26, 1.125 | Myristyl 115-120; |
| DEX0377_8.aa.21 | N | 0 -o | 779-790, 1.281; 1073-1100, 1.272; | Amidation 853-856; |
| | | | 1473-1484, 1.247; 1372-1425, 1.242; | Asn_Glycosylation |
| | | | 921-946, 1.231; 443-466, 1.228; | 256-259, 545-548, 663-666; |
| | | | 1242-1276, 1.222; 692-711, 1.214; | Camp_Phospho_Site 35-38, |
| | | | 855-894, 1.202; 907-918, 1.201; | 129-132, 130-133, 168-171, |
| | | | 1002-1025, 1.197; 1651-1659, 1.195; | 716-719; Ck2_Phospho_Site |
| | | | 1029-1068, 1.194; 1215-1226, 1.189; | 24-27, 135-138, 176-179, |
| | | | 812-841, 1.185; 1488-1525, 1.184; | 182-185, 188-191, 190-193, |
| | | | 473-500, 1.182; 1282-1312, 1.18; | 252-255, 391-394, 425-428, |
| | | | 1106-1139, 1.177; 48-57, 1.177; | 471-474, 554-557, 584-587, |
| | | | 743-775, 1.172; 552-579, 1.171; | 682-685, 706-709, 753-756, |
| | | | 69-80, 1.168; 609-641, 1.167; | 903-906, 904-907, 971-974; |
| | | | 1431-1458, 1.165; 409-419, 1.161; | Myristyl 106-111, 194-199, |
| | | | 295-313, 1.159; 431-438, 1.158; | 202-207, 223-228, 237-242, |
| | | | 1183-1195, 1.155; 1200-1213, 1.154; | 238-243, 279-284, 300-305, |
| | | | 986-996, 1.152; 1338-1358, 1.15; | 364-369, 455-460, 488-493, |
| | | | 164-172, 1.138; 394-401, 1.135; | 558-563, 562-567, 600-605, |
| | | | 949-965, 1.132; 140-151, 1.129; | 604-609, 735-740, 763-768, |
| | | | 584-591, 1.129; 1316-1331, 1.127; | 802-807, 817-822; |
| | | | 1149-1163, 1.125; 646-652, 1.123; | Pkc_Phospho_Site 29-31, |
| | | | 511-527, 1.123; 676-689, 1.12; | 71-73, 167-169, 304-306, |
| | | | 977-984, 1.119; 329-338, 1.118; | 308-310, 317-319, 384-386, |
| | | | 33-43, 1.116; 662-670, 1.114; | 412-414, 471-473, 554-556, |
| | | | 379-387, 1.114; 1554-1560, 1.108; | 666-668, 768-770, 853-855; |
| | | | 1564-1574, 1.107; 4-17, 1.105; | Prokar_Lipoprotein |
| | | | 732-738, 1.105; 1543-1552, 1.105; | 446-456, 477-487, 571-581; |
| | | | 1587-1596, 1.102; 722-730, 1.1; | |
| | | | 593-603, 1.098; 1531-1539, 1.096; | |
| | | | 357-364, 1.095; 94-107, 1.094; | |
| | | | 237-246, 1.086; 321-327, 1.086; | |
| | | | 544-550, 1.082; 255-261, 1.08; | |
| | | | 367-373, 1.079; 264-272, 1.076; | |
| | | | 1670-1686, 1.074; 111-117, 1.073; | |
| | | | 1631-1637, 1.058; 212-218, 1.056; | |
| | | | 1363-1369, 1.055 | |
| DEX0377_8.aa.22 | N | 0 -o | 92-110, 1.116; 61-76, 1.105; | Camp_Phospho_Site 94-97, |
| | | | 6-26, 1.087; 114-120, 1.073 | 132-135, 133-136; |
| | | | | Ck2_Phospho_Site 40-43, |
| | | | | 83-86, 138-141; Myristyl |
| | | | | 35-40, 46-51, 52-57, 55-60; |
| | | | | Pkc_Phospho_Site 27-29, |
| | | | | 88-90, 145-147; |
| DEX0377_20.aa.2 | N | 0 -o | 75-100, 1.14; 20-52, 1.132 | Ck2_Phospho_Site 52-55, |
| | | | | 64-67, 102-105; Myristyl |
| | | | | 69-74; Pkc_Phospho_Site |
| | | | | 3-5; |
| DEX0377_20.aa.3 | N | 0 -o | 55-72, 1.209; 115-140, 1.179; | Atp_Gtp_A 252-259; |
| | | | 207-220, 1.124; 82-100, 1.123; | Camp_Phospho_Site 54-57; |
| | | | 18-27, 1.123; 164-178, 1.115; | Ck2_Phospho_Site 80-83, |
| | | | 242-249, 1.112; 145-162, 1.087; | 113-116, 167-170, 229-232, |
| | | | 9-16, 1.079; 222-229, 1.065 | 261-264; Glycosaminoglycan |
| | | | | 186-189, 239-242; Myristyl |
| | | | | 108-113, 252-257; |
| | | | | Pkc_Phospho_Site 7-9, |
| | | | | 186-188; Tyr_Phospho_Site |
| | | | | 114-120; Hbgf_Fgf 150-173; |
| DEX0377_20.aa.5 | N | 0 -o | 6-24, 1.136; 46-53, 1.112; | Atp_Gtp_A 56-63; |
| | | | 26-33, 1.065 | Ck2_Phospho_Site 33-36, 65-68; |
| | | | | Glycosaminoglycan 43-46; |
| | | | | Myristyl 56-61; |
| | | | | Tyr_Phospho_Site 22-29; |
| DEX0377_20.aa.7 | N | 0 -o | 44-106, 1.197; 19-38, 1 .173; | Asn_Glycosylation |
| | | | 4-17, 1.135; 110-117, 1.127 | 115-118; Myristyl 72-77, |
| | | | | 93-98; Pkc_Phospho_Site |
| | | | | 44-46; |
| DEX0377_20.aa.8 | N | 0 -o | 44-105, 1.197; 19-38, 1.173; | Myristyl 72-77, 93-98; |
| | | | 4-17, 1.135 | Pkc_Phospho_Site 44-46; |
| DEX0377_20.aa.11 | N | 0 -o | 165-178, 1.247; 95-113, 1.131; | Ck2_Phospho_Site 47-50, |
| | | | 83-91, 1.127; 60-76, 1.127; | 76-79, 92-95, 148-151, |
| | | | 24-46, 1.116; 15-21, 1.077; | 155-158; Myristyl 25-30; |
| | | | 131-143, 1.074 | Pkc_Phospho_Site 47-49, |
| | | | | 80-82, 150-152, 155-157; |
| DEX0377_20.aa.12 | N | 0 -i | 24-32, 1.044 | Ck2_Phospho_Site 24-27; |
| | | | | Pkc_Phospho_Site 24-26; |
| DEX0377_20.aa.13 | y | 1 -o814-836i | 813-841, 1.275; 743-776, 1.272; | Cadherin 135-145, 245-255, |
| | | | 551-563, 1.218; 110-133, 1.19; | 351-361, 462-472, 565-575, |
| | | | 59-70, 1.187; 1096-1105, 1.184; | 668-678; Asn_Glycosylation |
| | | | 5-29, 1.179; 684-706, 1.174; | 53-56, 153-156, 311-314, |
| | | | 233-245, 1.165; 450-459, 1.162; | 312-315, 352-355, 373-376, |
| | | | 1042-1057, 1.162; 671-678, 1.16; | 455-458, 516-519, 635-638, |
| | | | 325-334, 1.159; 469-479, 1.156; | 686-689, 739-742, 759-762, |
| | | | 72-81, 1.155; 606-612, 1.146; | 780-783, 785-788, 906-909; |
| | | | 175-195, 1.145; 396-429, 1.142; | Camp_Phospho_Site 878-881, |
| | | | 574-599, 1.142; 935-968, 1.141; | 987-990; Ck2_Phospho_Site |
| | | | 267-278, 1.14; 256-265, 1.136; | 34-37, 86-89, 107-110, |
| | | | 380-389, 1.132; 502-511, 1.128; | 155-158, 170-173, 172-175, |
| | | | 202-209, 1.128; 520-529, 1.125; | 246-249, 282-285, 288-291, |
| | | | 95-102, 1.12; 617-632, 1.118; | 379-382, 392-395, 394-397, |
| | | | 878-888, 1.116; 216-222, 1.109; | 430-433, 482-485, 497-500, |
| | | | 781-788, 1.108; 287-305, 1.106; | 499-502, 518-521, 548-551, |
| | | | 436-443, 1.103; 142-150, 1.099; | 566-569, 600-603, 602-605, |
| | | | 726-734, 1.097; 1014-1023, 1.096; | 741-744, 799-802, 891-894, |
| | | | 1136-1143, 1.096; 358-366, 1.095; | 895-898, 991-994, 997-1000; |
| | | | 485-491, 1.092; 903-909, 1.092; | Myristyl 62-67, 105-110, |
| | | | 658-666, 1.085; 311-317, 1.085; | 490-495, 527-532, 630-635, |
| | | | 341-349, 1.082; 974-980, 1.081; | 699-704, 725-730, 980-985; |
| | | | 988-999, 1.078; 1113-1128, 1.076; | Pkc_Phospho_Site 34-36, |
| | | | 368-376, 1.072; 1179-1188, 1.069; | 94-96, 304-306, 379-381, |
| | | | 893-899, 1.069; 1026-1032, 1.063; | 394-396, 441-443, 449-451, |
| | | | 640-646, 1.062; 158-166, 1.051; | 503-505, 548-550, 574-576, |
| | | | 46-53, 1.046; 1005-1011, 1.033 | 663-665, 688-690, 881-883, |
| | | | | 932-934, 962-964, 986-988; |
| | | | | Tyr_Phospho_Site 417-424, |
| | | | | 505-511; |
| DEX0377_20.aa.14 | y | 1 -o814-836i | 813-841, 1.275; 743-776, 1.272; | Cadherin 135-145, 245-255, |
| | | | 551-563, 1.218; 110-133, 1.19; | 351-361, 462-472, 565-575, |
| | | | 59-70, 1.187; 5-29, 1.179; | 668-678; Asn_Glycosylation |
| | | | 684-706, 1.174; 233-245, 1.165; | 53-56, 153-156, 311-314, |
| | | | 450-459, 1.162; 671-678, 1.16; | 312-315, 352-355, 373-376, |
| | | | 325-334, 1.159; 469-479, 1.156; | 455-458, 516-519, 635-638, |
| | | | 72-81, 1.155; 606-612, 1.146; | 686-689, 739-742, 759-762, |
| | | | 175-195, 1.145; 396-429, 1.142; | 780-783, 785-788, 906-909; |
| | | | 574-599, 1.142; 935-968, 1.141; | Camp_Phospho_Site 878-881, |
| | | | 267-278, 1.14; 256-265, 1.136; | 987-990; Ck2_Phospho_Site |
| | | | 1018-1029, 1.132; 380-389, 1.132; | 34-37, 86-89, 107-110, |
| | | | 502-511, 1.128; 202-209, 1.128; | 155-158, 170-173, 172-175, |
| | | | 520-529, 1.125; 95-102, 1.12; | 246-249, 282-285, 288-291, |
| | | | 617-632, 1.118; 878-888, 1.116; | 379-382, 392-395, 394-397, |
| | | | 216-222, 1.109; 781-788, 1.108; | 430-433, 482-485, 497-500, |
| | | | 287-305, 1.106; 436-443, 1.103; | 499-502, 518-521, 548-551, |
| | | | 142-150, 1.099; 726-734, 1.097; | 566-569, 600-603, 602-605, |
| | | | 358-366, 1.095; 903-909, 1.092; | 741-744, 799-802, 891-894, |
| | | | 485-491, 1.092; 1005-1011, 1.086; | 895-898, 991-994, 997-1000; |
| | | | 658-666, 1.085; 311-317, 1.085; | Myristyl 62-67, 105-110, |
| | | | 341-349, 1.082; 974-980, 1.081; | 490-495, 527-532, 630-635, |
| | | | 988-999, 1.078; 368-376, 1.072; | 699-704, 725-730, 980-985; |
| | | | 893-899, 1.069; 640-646, 1.062; | Pkc_Phospho_Site 34-36, |
| | | | 158-166, 1.051; 46-53, 1.046 | 94-96, 304-306, 379-381, |
| | | | | 394-396, 441-443, 449-451, |
| | | | | 503-505, 548-550, 574-576, |
| | | | | 663-665, 688-690, 881-883, |
| | | | | 932-934, 962-964, 986-988; |
| | | | | Tyr_Phospho_Site 417-424, |
| | | | | 505-511; |
| DEX0377_20.aa.15 | y | 1 -o814-836i | 813-841, 1.275; 743-776, 1.272; | Cadherin 135-145, 245-255, |
| | | | 551-563, 1.218; 110-133, 1.19; | 351-361, 462-472, 565-575, |
| | | | 59-70, 1.187; 5-29, 1.179; | 668-678; Asn_Glycosylation |
| | | | 684-706, 1.174; 233-245, 1.165; | 53-56, 153-156, 311-314, |
| | | | 450-459, 1.162; 1076-1091, 1.162; | 312-315, 352-355, 373-376, |
| | | | 671-678, 1.16; 325-334, 1.159; | 455-458, 516-519, 635-638, |
| | | | 469-479, 1.156; 72-81, 1.155; | 686-689, 739-742, 759-762, 780-783, |
| | | | 606-612, 1.146; 175-195, 1.145; | 785-788, 906-909; |
| | | | 396-429, 1.142; 574-599, 1.142; | Camp_Phospho_Site 878-881, |
| | | | 935-968, 1.141; 267-278, 1.14; | 987-990; Ck2_Phospho_Site |
| | | | 256-265, 1.136; 380-389, 1.132; | 34-37, 86-89, 107-110, |
| | | | 502-511, 1.128; 202-209, 1.128; | 155-158, 170-173, 172-175, |
| | | | 520-529, 1.125; 95-102, 1.12; | 246-249, 282-285, 288-291, |
| | | | 617-632, 1.118; 878-888, 1.116; | 379-382, 392-395, 394-397, |
| | | | 1021-1035, 1.111; 216-222, 1.109; | 430-433, 482-485, 497-500, |
| | | | 781-788, 1.108; 287-305, 1.106; | 499-502, 518-521, 548-551, |
| | | | 436-443, 1.103; 142-150, 1.099; | 566-569, 600-603, 602-605, |
| | | | 726-734, 1.097; 1050-1057, 1.096; | 741-744, 799-802, 891-894, |
| | | | 358-366, 1.095; 903-909, 1.092; | 895-898, 991-994, 997-1000; |
| | | | 485-491, 1.092; 1005-1016, 1.09; | Myristyl 62-67, 105-110, |
| | | | 658-666, 1.085; 311-317, 1.085; | 490-495, 527-532, 630-635, |
| | | | 341-349, 1.082; 974-980, 1.081; | 699-704, 725-730, 980-985; |
| | | | 988-999, 1.078; 368-376, 1.072; | Pkc_Phospho_Site 34-36, |
| | | | 893-899, 1.069; 1060-1066, 1.063; | 94-96, 304-306, 379-381, |
| | | | 640-646, 1.062; 158-166, 1.051; | 394-396, 441-443, 449-451, |
| | | | 46-53, 1.046 | 503-505, 548-550, 574-576, |
| | | | | 663-665, 688-690, 881-883, |
| | | | | 932-934, 962-964, 986-988; |
| | | | | Tyr_Phospho_Site 417-424, |
| | | | | 505-511; |
| DEX0377_20.aa.17 | y | 1 -i53-72o | 51-69, 1.223; 76-92, 1.17; | Camp_Phospho_Site 99-102; |
| | | | 13-47, 1.146 | Ck2_Phospho_Site 42-45, |
| | | | | 92-95; Pkc_Phospho_Site |
| | | | | 71-73; |
| DEX0377_20.aa.18 | y | 1 -o814-836i | 813-841, 1.275; 743-776, 1.272; | Cadherin 135-145, 245-255, |
| | | | 551-563, 1.218; 110-133, 1.19; | 351-361, 462-472, 565-575, |
| | | | 59-70, 1.187; 1130-1139, 1.184; | 668-678; Asn_Glycosylation |
| | | | 5-29, 1.179; 684-706, 1.174; | 53-56, 153-156, 311-314, |
| | | | 233-245, 1.165; 450-459, 1.162; | 312-315, 352-355, 373-376, |
| | | | 1076-1091, 1.162; 671-678, 1.16; | 455-458, 516-519, 635-638, |
| | | | 325-334, 1.159; 469-479, 1.156; | 686-689, 739-742, 759-762, |
| | | | 72-81, 1.155; 606-612, 1.146; | 780-783, 785-788, 906-909; |
| | | | 175-195, 1.145; 396-429, 1.142; | Camp_Phospho_Site 878-881, |
| | | | 574-599, 1.142; 935-968, 1.141; | 987-990; Ck2_Phospho_Site |
| | | | 267-278, 1.14; 256-265, 1.136; | 34-37, 86-89, 107-110, |
| | | | 380-389, 1.132; 502-511, 1.128; | 155-158, 170-173, 172-175, |
| | | | 202-209, 1.128; 520-529, 1.125; | 246-249, 282-285, 288-291, |
| | | | 95-102, 1.12; 617-632, 1.118; | 379-382, 392-395, 394-397, |
| | | | 878-888, 1.116; 1021-1035, 1.111; | 430-433, 482-485, 497-500, |
| | | | 216-222, 1.109; 781-788, 1.108; | 499-502, 518-521, 548-551, |
| | | | 287-305, 1.106; 436-443, 1.103; | 566-569, 600-603, 602-605, |
| | | | 142-150, 1.099; 726-734, 1.097; | 741-744, 799-802, 891-894, |
| | | | 1050-1057, 1.096; 1170-1177, 1.096; | 895-898, 991-994, 997-1000; |
| | | | 358-366, 1.095; 903-909, 1.092; | Myristyl 62-67, 105-110, |
| | | | 485-491, 1.092; 1005-1016, 1.09; | 490-495, 527-532, 630-635, |
| | | | 658-666, 1.085; 311-317, 1.085; | 699-704, 725-730, 980-985; |
| | | | 341-349, 1.082; 974-980, 1.081; | Pkc_Phospho_Site 34-36, |
| | | | 988-999, 1.078; 1147-1162, 1.076; | 94-96, 304-306, 379-381, |
| | | | 368-376, 1.072; 1213-1222, 1.069; | 394-396, 441-443, 449-451, |
| | | | 893-899, 1.069; 1060-1066, 1.063; | 503-505, 548-550, 574-576, |
| | | | 640-646, 1.062; 158-166, 1.051; | 663-665, 688-690, 881-883, |
| | | | 46-53, 1.046 | 932-934, 962-964, 986-988; |
| | | | | Tyr_Phospho_Site 417-424, |
| | | | | 505-511; |
| DEX0377_20.aa.19 | y | 1 -o814-836i | 813-841, 1.275; 743-776, 1.272; | Cadherin 135-145, 245-255, |
| | | | 551-563, 1.218; 110-133, 1.19; | 351-361, 462-472, 565-575, |
| | | | 59-70, 1.187; 1073-1082, 1.184; | 668-678; Asn_Glycosylation |
| | | | 5-29, 1.179; 684-706, 1.174; | 53-56, 153-156, 311-314, |
| | | | 233-245, 1.165; 450-459, 1.162; | 312-315, 352-355, 373-376, |
| | | | 671-678, 1.16; 325-334, 1.159; | 455-458, 516-519, 635-638, |
| | | | 469-479, 1.156; 72-81, 1.155; | 686-689, 739-742, 759-762, |
| | | | 606-612, 1.146; 175-195, 1.145; | 780-783, 785-788, 906-909; |
| | | | 396-429, 1.142; 574-599, 1.142; | Camp_Phospho_Site 878-881, |
| | | | 935-968, 1.141; 267-278, 1.14; | 987-990; Ck2_Phospho_Site |
| | | | 256-265, 1.136; 380-389, 1.132; | 34-37, 86-89, 107-110, |
| | | | 502-511, 1.128; 202-209, 1.128; | 155-158, 170-173, 172-175, |
| | | | 520-529, 1.125; 95-102, 1.12; | 246-249, 282-285, 288-291, |
| | | | 617-632, 1.118; 878-888, 1.116; | 379-382, 392-395, 394-397, |
| | | | 216-222, 1.109; 781-788, 1.108; | 430-433, 482-485, 497-500, |
| | | | 287-305, 1.106; 436-443, 1.103; | 499-502, 518-521, 548-551, |
| | | | 142-150, 1.099; 726-734, 1.097; | 566-569, 600-603, 602-605, |
| | | | 1113-1120, 1.096; 358-366, 1.095; | 741-744, 799-802, 891-894, |
| | | | 903-909, 1.092; 485-491, 1.092; | 895-898, 991-994, 997-1000; |
| | | | 658-666, 1.085; 311-317, 1.085; | Myristyl 62-67, 105-110, |
| | | | 341-349, 1.082; 974-980, 1.081; | 490-495, 527-532, 630-635, |
| | | | 988-999, 1.078; 1090-1105, 1.076; | 699-704, 725-730, 980-985; |
| | | | 368-376, 1.072; 1005-1020, 1.071; | Pkc_Phospho_Site 34-36, |
| | | | 1156-1165, 1.069; 893-899, 1.069; | 94-96, 304-306, 379-381, |
| | | | 640-646, 1.062; 158-166, 1.051; | 394-396, 441-443, 449-451, |
| | | | 46-53, 1.046 | 503-505, 548-550, 574-576, |
| | | | | 663-665, 688-690, 881-883, |
| | | | | 932-934, 962-964, 986-988; |
| | | | | Tyr_Phospho_Site 417-424, |
| | | | | 505-511; |
| DEX0377_24.aa.3 | N | 0 -o | 94-121, 1.19; 22-33, 1.119; | Ck2_Phospho_Site 67-70; |
| | | | 76-91, 1.113; 47-53, 1.113; | Glycosaminoglycan 23-26; |
| | | | 37-43, 1.113 | |
| DEX0377_26.aa.5 | y | 0 -i | 22-34, 1.239 | Ck2_Phospho_Site 24-27; |
| | | | | Pkc_Phospho_Site 5-7; |
| DEX0377_26.aa.7 | N | 0 -o | 7-19, 1.239; 55-77, 1.197; | Ck2_Phospho_Site 7-10, |
| | | | 87-99, 1.195; 201-232, 1.175; | 241-244; Myristyl 168-173, |
| | | | 45-53, 1.16; 143-160, 1.154; | 171-176, 227-232; |
| | | | 30-40, 1.138; 120-134, 1.103; | Pkc_Phospho_Site 82-84, |
| | | | 109-117, 1.1; 181-187, 1.075 | 175-177, 204-206; Ppta |
| | | | | 197-206; |
| DEX0377_26.aa.9 | N | 0 -o | 7-19, 1.239; 55-77, 1.197; | Ck2_Phospho_Site 7-10; |
| | | | 87-99, 1.195; 106-123, 1.171; | Pkc_Phospho_Site 82-84; |
| | | | 45-53, 1.16; 30-40, 1.138 | |
| DEX0377_26.aa.10 | N | 0 -o | 7-19, 1.239; 55-77, 1.197; | Ck2_Phospho_Site 7-10, |
| | | | 87-99, 1.195; 45-53, 1.16; | 256-259, 261-264, 285-288; |
| | | | 201-220, 1.154; 143-160, 1.154; | Myristyl 168-173, 171-176; |
| | | | 30-40, 1.138; 228-256, 1.134; | Pkc_Phospho_Site 82-84, |
| | | | 286-295, 1.121; 265-273, 1.117; | 175-177, 204-206, 227-229; |
| | | | 120-134, 1.103; 109-117, 1.1; | Ppta 197-206; |
| | | | 181-187, 1.075; 299-306, 1.054 | |
| DEX0377_26.aa.11 | N | 0 -o | 18-58, 1.195; 160-179, 1.154; | Ck2_Phospho_Site 12-15, |
| | | | 102-119, 1.154; 187-215, 1.134; | 22-25, 33-36, 215-218, |
| | | | 245-254, 1.121; 224-232, 1.117; | 220-223, 244-247; Myristyl |
| | | | 79-93, 1.103; 68-76, 1.1; | 127-132, 130-135; |
| | | | 140-146, 1.075; 258-265, 1.054 | Pkc_Phospho_Site 134-136, |
| | | | | 163-165, 186-188; Ppta 156-165; |
| DEX0377_32.aa.2 | y | 2 -i13-35o687- | 653-715, 1.268; 326-338, 1.242; | Cadherin 125-135, 234-244, |
| | | 7091 | 536-551, 1.234; 635-643, 1.232; | 338-348, 442-452, 552-562; |
| | | | 94-123, 1.228; 580-591, 1.205; | Amidation 191-194; |
| | | | 360-371, 1.19; 744-755, 1.187; | Asn_Glycosylation 51-54, |
| | | | 12-22, 1.183; 557-577, 1.18; | 188-191, 421-424, 570-573; |
| | | | 481-505, 1.174; 256-266, 1.165; | Ck2_Phospho_Site 38-41, |
| | | | 376-384, 1.163; 191-198, 1.142; | 269-272, 372-375, 374-377, |
| | | | 27-37, 1.141; 273-289, 1.139; | 416-419, 425-428, 477-480, |
| | | | 434-459, 1.136; 731-738, 1.132; | 479-482, 634-637, 729-732, |
| | | | 387-405, 1.132; 172-182, 1.13; | 782-785; Glycosaminoglycan |
| | | | 599-616, 1.124; 464-473, 1.12; | 743-746; Myristyl 46-51, |
| | | | 227-235, 1.119; 346-358, 1.116; | 57-62, 327-332, 328-333, |
| | | | 509-530, 1.113; 239-250, 1.113; | 474-479, 571-576, 760-765, |
| | | | 717-728, 1.107; 206-217, 1.107; | 761-766; Pkc_Phospho_Site |
| | | | 312-318, 1.098; 80-87, 1.092; | 124-126, 269-271, 331-333, |
| | | | 61-68, 1.085; 135-142, 1.085; | 431-433, 479-481, 537-539, |
| | | | 52-58, 1.078; 418-424, 1.063; | 629-631, 634-636, 782-784, |
| | | | 149-156, 1.061; 41-48, 1.058 | 791-793; Tyr_Phospho_Site |
| | | | | 397-404, 581-587; |
| DEX0377_34.aa.2 | N | 0 -o | 4-20, 1.171; 46-82, 1.159; | Asn_Glycosylation 36-39; |
| | | | 103-111, 1.07 | Ck2_Phospho_Site 38-41; |
| | | | | Myristyl 26-31, 32-37, |
| | | | | 71-76, 95-100, 98-103, |
| | | | | 119-124, 120-125, 121-126; |
| | | | | Pkc_Phospho_Site 49-51; |
| DEX0377_34.aa.5 | N | 0 -o | 4-13, 1.186; 30-46, 1.102; | Amidation 107-110; |
| | | | 145-152, 1.088; 48-56, 1.083; | Camp_Phospho_Site 110-113; |
| | | | 86-92, 1.076; 116-133, 1.069 | Ck2_Phospho_Site 17-20, |
| | | | | 64-67; Glycosaminoglycan |
| | | | | 158-161; Myristyl 18-23, |
| | | | | 73-78, 114-119, 159-164, |
| | | | | 161-166; Pkc_Phospho_Site |
| | | | | 24-26, 145-147; |
| DEX0377_35.aa.2 | N | 0 -o | 33-39, 1.109; 60-67, 1.085; | Ck2_Phospho_Site 15-18, |
| | | | 69-75, 1.06 | 52-55, 76-79; |
| DEX0377_35.aa.3 | Y | 0 -o | 4-37, 1.216; 117-125, 1.158; | Ck2_Phospho_Site 58-61, |
| | | | 41-52, 1.121; 87-107, 1.099; | 113-116; Myristyl 97-102; |
| | | | 71-81, 1.07 | |
| DEX0377_35.aa.7 | N | 2 -i20-37o41-63i | 18-65, 1.151; 4-15, 1.137; | Ck2_Phospho_Site 75-78, |
| | | | 93-99, 1.109; 120-127, 1.085; | 112-115, 136-139; Myristyl |
| | | | 129-135, 1.06 | 31-36, 46-51, 50-55, 51-56, |
| | | | | 54-59, 58-63, 63-68; |
| DEX0377_37.aa.2 | N | 0 -o | 128-140, 1.203; 69-119, 1.171; | Ck2_Phospho_Site 3-6; |
| | | | 52-61, 1.121; 19-34, 1.088; | Myristyl 11-16, 71-76, |
| | | | 36-44, 1.081; 142-148, 1.064 | 117-122, 149-154; |
| | | | | Pkc_Phospho_Site 12-14; |
| | | | | Rgd 16-18; Prokar_Lipoprotein |
| | | | | 112-122; |
| DEX0377_37.aa.3 | y | 0 -o | 116-128, 1.203; 57-107, 1.171; | Ck2_Phospho_Site 180-183, |
| | | | 172-185, 1.128; 24-49, 1.121; | 189-192; Myristyl 40-45, |
| | | | 161-170, 1.092; 8-15, 1.063; | 59-64, 105-110, 128-133, |
| | | | 130-136, 1.034 | 159-164, 168-173; |
| | | | | Pkc_Phospho_Site 45-47, |
| | | | | 154-156; Prokar_Lipoprotein |
| | | | | 100-110; |
| DEX0377_41.aa.3 | N | 0 -o | 27-34, 1.106 | Pkc_Phospho_Site 11-13; |
| DEX0377_41.aa.4 | N | 0 -o | 238-257, 1.163; 75-108, 1.163; | Camp_Phospho_Site |
| | | | 172-185, 1.135; 25-36, 1.129; | 139-142, 168-171, 226-229; |
| | | | 123-131, 1.102; 6-19, 1.097; | Ck2_Phospho_Site 42-45, |
| | | | 62-72, 1.091; 202-220, 1.087; | 48-51, 52-55, 119-122, |
| | | | 138-144, 1.082; 225-235, 1.064; | 142-145, 218-221; |
| | | | 148-154, 1.058 | Glycosaminoglycan 22-25, |
| | | | | 148-151; Myristyl 40-45, |
| | | | | 75-80, 76-81, 115-120, |
| | | | | 170-175, 173-178, 174-179; |
| | | | | Pkc_Phospho_Site 153-155, |
| | | | | 177-179, 218-220, 232-234; |
| DEX0377_41.aa.10 | N | 0 -o | 781-795, 1.208; 1494-1528, 1.203; | Amidation 297-300; |
| | | | 1712-1719, 1.193; 1544-1552, 1.189; | Asn_Glycosylation 572-575, |
| | | | 638-649, 1.181; 1760-1775, 1.178; | 976-979; Camp_Phospho_Site |
| | | | 1843-1857, 1.174; 686-704, 1.173; | 139-142, 168-171, 226-229, |
| | | | 1803-1813, 1.172; 1178-1188, 1.171; | 299-302; Ck2_Phospho_Site |
| | | | 1213-1229, 1.166; 75-108, 1.163; | 42-45, 48-51, 52-55, |
| | | | 231-238, 1.162; 473-499, 1.16; | 119-122, 142-145, 218-221, |
| | | | 592-601, 1.16; 1945-1972, 1.152; | 229-232, 274-277, 325-328, |
| | | | 2218-2244, 1.144; 1144-1157, 1.139; | 338-341, 584-587, 639-642, |
| | | | 982-993, 1.137; 1431-1442, 1.137; | 803-806, 880-883, 885-888, |
| | | | 373-380, 1.136; 172-185, 1.135; | 889-892, 899-902, 905-908, |
| | | | 751-769, 1.135; 821-835, 1.133; | 929-932, 938-941, 978-981, |
| | | | 1586-1595, 1.131; 25-36, 1.129; | 999-1002; Glycosaminoglycan |
| | | | 334-348, 1.127; 1165-1176, 1.127; | 22-25, 148-151, 309-312; |
| | | | 312-332, 1.123; 1384-1393, 1.122; | Myristyl 40-45, 75-80, |
| | | | 412-465, 1.122; 1896-1905, 1.121; | 76-81, 115-120, 170-175, |
| | | | 1817-1824, 1.121; 652-660, 1.12; | 173-178, 174-179, 255-260, |
| | | | 503-511, 1.118; 1725-1733, 1.118; | 449-454, 552-557, 595-600, |
| | | | 1783-1795, 1.117; 1681-1700, 1.117; | 668-673, 809-814, 846-851; |
| | | | 1405-1414, 1.115; 803-809, 1.111; | Pkc_Phospho_Site 153-155, |
| | | | 1657-1666, 1.11; 1448-1455, 1.109; | 177-179, 218-220, 233-235, |
| | | | 1607-1627, 1.109; 1278-1301, 1.109; | 246-248, 278-280, 452-454, |
| | | | 1191-1199, 1.106; 1111-1120, 1.105; | 574-576, 588-590, 655-657, |
| | | | 624-631, 1.105; 2137-2169, 1.103; | 891-893, 921-923, 982-984; |
| | | | 123-131, 1.102; 526-534, 1.101; | Prokar_Lipoprotein 314-324; |
| | | | 2116-2124, 1.099; 1470-1484, 1.098; | Protein_Kinase_St 705-717; |
| | | | 2071-2089, 1.098; 6-19, 1.097; | |
| | | | 2184-2200, 1.096; 1091-1107, 1.095; | |
| | | | 298-304, 1.095; 908-926, 1.094; | |
| | | | 1880-1892, 1.093; 2009-2015, 1.092; | |
| | | | 62-72, 1.091; 1029-1052, 1.091; | |
| | | | 2025-2032, 1.088; 252-265, 1.087; | |
| | | | 202-220, 1.087; 138-144, 1.082; | |
| | | | 1750-1757, 1.082; 725-731, 1.082; | |
| | | | 2091-2107, 1.082; 1014-1022, 1.079; | |
| | | | 1359-1369, 1.077; 1574-1580, 1.075; | |
| | | | 707-715, 1.074; 845-851, 1.073; | |
| | | | 615-622, 1.067; 1122-1129, 1.067; | |
| | | | 1420-1429, 1.066; 404-410, 1.066; | |
| | | | 279-287, 1.063; 1309-1319, 1.059; | |
| | | | 148-154, 1.058; 1633-1639, 1.058; | |
| | | | 1001-1007, 1.057; 384-390, 1.056; | |
| | | | 1201-1207, 1.055; 583-589, 1.048; | |
| | | | 1828-1841, 1.045; 717-723, 1.043; | |
| | | | 562-573, 1.042; 1340-1346, 1.034 | |
| DEX0377_41.aa.11 | N | 0 -o | 781-795, 1.208; 1494-1528, 1.203; | Amidation 297-300; |
| | | | 1712-1719, 1.193; 1544-1552, 1.189; | Asn_Glycosylation 572-575, |
| | | | 638-649, 1.181; 1760-1775, 1.178; | 976-979; Camp_Phospho_Site |
| | | | 1843-1857, 1.174; 686-704, 1.173; | 139-142, 168-171, 226-229, |
| | | | 1803-1813, 1.172; 1178-1188, 1.171; | 299-302; Ck2_Phospho_Site |
| | | | 1213-1229, 1.166; 75-108, 1.163; | 42-45, 48-51, 52-55, 119-122, |
| | | | 231-238, 1.162; 473-499, 1.16; | 142-145, 218-221, 229-232, |
| | | | 592-601, 1.16; 1945-1972, 1.152; | 274-277, 325-328, 338-341, |
| | | | 1144-1157, 1.139; 2305-2318, 1.138; | 584-587, 639-642, 803-806, |
| | | | 982-993, 1.137; 1431-1442, 1.137; | 880-883, 885-888, 889-892, |
| | | | 373-380, 1.136; 172-185, 1.135; | 899-902, 905-908, 929-932, |
| | | | 751-769, 1.135; 821-835, 1.133; | 938-941, 978-981, 999-1002; |
| | | | 1586-1595, 1.131; 25-36, 1.129; | Glycosaminoglycan 22-25, |
| | | | 334-348, 1.127; 1165-1176, 1.127; | 148-151, 309-312; Myristyl |
| | | | 312-332, 1.123; 1384-1393, 1.122; | 40-45, 75-80, 76-81, |
| | | | 412-465, 1.122; 1896-1905, 1.121; | 115-120, 170-175, 173-178, |
| | | | 1817-1824, 1.121; 652-660, 1.12; | 174-179, 255-260, 449-454, |
| | | | 503-511, 1.118; 1725-1733, 1.118; | 552-557, 595-600, 668-673, |
| | | | 1783-1795, 1.117; 1681-1700, 1.117; | 809-814, 846-851; |
| | | | 1405-1414, 1.115; 2282-2290, 1.112; | Pkc_Phospho_Site 153-155, |
| | | | 803-809, 1.111; 1657-1666, 1.11; | 177-179, 218-220, 233-235, |
| | | | 1448-1455, 1.109; 1607-1627, 1.109; | 246-248, 278-280, 452-454, |
| | | | 1278-1301, 1.109; 1191-1199, 1.106; | 574-576, 588-590, 655-657, |
| | | | 1111-1120, 1.105; 624-631, 1.105; | 891-893, 921-923, 982-984; |
| | | | 2137-2169, 1.103; 123-131, 1.102; | Prokar_Lipoprotein 314-324; |
| | | | 526-534, 1.101; 2116-2124, 1.099; | Protein_Kinase_St 705-717; |
| | | | 1470-1484, 1.098; 2071-2089, 1.098; | |
| | | | 6-19, 1.097; 2184-2200, 1.096; | |
| | | | 1091-1107, 1.095; 298-304, 1.095; | |
| | | | 908-926, 1.094; 1880-1892, 1.093; | |
| | | | 2009-2015, 1.092; 62-72, 1.091; | |
| | | | 1029-1052, 1.091; 2025-2032, 1.088; | |
| | | | 252-265, 1.087; 202-220, 1.087; | |
| | | | 138-144, 1.082; 1750-1757, 1.082; | |
| | | | 725-731, 1.082; 2091-2107, 1.082; | |
| | | | 1014-1022, 1.079; 1359-1369, 1.077; | |
| | | | 2328-2337, 1.075; 1574-1580, 1.075; | |
| | | | 707-715, 1.074; 845-851, 1.073; | |
| | | | 615-622, 1.067; 2339-2357, 1.067; | |
| | | | 1122-1129, 1.067; 1420-1429, 1.066; | |
| | | | 404-410, 1.066; 2257-2265, 1.064; | |
| | | | 279-287, 1.063; 2220-2232, 1.061; | |
| | | | 1309-1319, 1.059; 148-154, 1.058; | |
| | | | 1633-1639, 1.058; 1001-1007, 1.057; | |
| | | | 384-390, 1.056; 1201-1207, 1.055; | |
| | | | 583-589, 1.048; 1828-1841, 1.045; | |
| | | | 717-723, 1.043; 562-573, 1.042; | |
| | | | 1340-1346, 1.034 | |
| DEX0377_41.aa.12 | N | 0 -o | 1213-1236, 1.265; 781-795, 1.208; | Amidation 297-300; |
| | | | 638-649, 1.181; 686-704, 1.173; | Asn_Glycosylation 572-575, |
| | | | 1178-1188, 1.171; 75-108, 1.163; | 976-979; Camp_Phospho_Site |
| | | | 231-238, 1.162; 473-499, 1.16; | 139-142, 168-171, 226-229, |
| | | | 592-601, 1.16; 1144-1157, 1.139; | 299-302; Ck2_Phospho_Site |
| | | | 982-993, 1.137; 373-380, 1.136; | 42-45, 48-51, 52-55, |
| | | | 172-185, 1.135; 751-769, 1.135; | 119-122, 142-145, 218-221, |
| | | | 821-835, 1.133; 25-36, 1.129; | 229-232, 274-277, 325-328, |
| | | | 334-348, 1.127; 1165-1176, 1.127; | 338-341, 584-587, 639-642, |
| | | | 312-332, 1.123; 412-465, 1.122; | 803-806, 880-883, 885-888, |
| | | | 652-660, 1.12; 503-511, 1.118; | 889-892, 899-902, 905-908, |
| | | | 803-809, 1.111; 1191-1199, 1.106; | 929-932, 938-941, 978-981, |
| | | | 1111-1120, 1.105; 624-631, 1.105; | 999-1002; Glycosaminoglycan |
| | | | 123-131, 1.102; 526-534, 1.101; | 22-25, 148-151, 309-312; |
| | | | 6-19, 1.097; 1091-1107, 1.095; | Myristyl 40-45, 75-80, |
| | | | 298-304, 1.095; 908-926, 1.094; | 76-81, 115-120, 170-175, |
| | | | 1029-1052, 1.091; 62-72, 1.091; | 173-178, 174-179, 255-260, |
| | | | 252-265, 1.087; 202-220, 1.087; | 449-454, 552-557, 595-600, |
| | | | 138-144, 1.082; 725-731, 1.082; | 668-673, 809-814, 846-851; |
| | | | 1014-1022, 1.079; 707-715, 1.074; | Pkc_Phospho_Site 153-155, |
| | | | 845-851, 1.073; 615-622, 1.067; | 177-179, 218-220, 233-235, |
| | | | 1122-1129, 1.067; 404-410, 1.066; | 246-248, 278-280, 452-454, |
| | | | 279-287, 1.063; 148-154, 1.058; | 574-576, 588-590, 655-657, |
| | | | 1001-1007, 1.057; 384-390, 1.056; | 891-893, 921-923, 982-984; |
| | | | 1201-1207, 1.055; 583-589, 1.048; | Prokar_Lipoprotein 314-324; |
| | | | 717-723, 1.043; 562-573, 1.042 | Protein_Kinase_St 705-717; |
| DEX0377_41.aa.13 | N | 0 -o | 781-795, 1.208; 638-649, 1.181; | Amidation 297-300; |
| | | | 686-704, 1.173; 1178-1188, 1.171; | Asn_Glycosylation 572-575, |
| | | | 1213-1229, 1.166; 75-108, 1.163; | 976-979; Camp_Phospho_Site |
| | | | 231-238, 1.162; 473-499, 1.16; | 139-142, 168-171, 226-229, |
| | | | 592-601, 1.16; 1144-1157, 1.139; | 299-302; Ck2_Phospho_Site |
| | | | 982-993, 1.137; 373-380, 1.136; | 42-45, 48-51, 52-55, |
| | | | 172-185, 1.135; 751-769, 1.135; | 119-122, 142-145, 218-221, |
| | | | 821-835, 1.133; 25-36, 1.129; | 229-232, 274-277, 325-328, |
| | | | 334-348, 1.127; 1165-1176, 1.127; | 338-341, 584-587, 639-642, |
| | | | 312-332, 1.123; 412-465, 1.122; | 803-806, 880-883, 885-888, |
| | | | 652-660, 1.12; 503-511, 1.118; | 889-892, 899-902, 905-908, |
| | | | 803-809, 1.111; 1278-1301, 1.109; | 929-932, 938-941, 978-981, |
| | | | 1191-1199, 1.106; 1111-1120, 1.105; | 999-1002; Glycosaminoglycan |
| | | | 624-631, 1.105; 123-131, 1.102; | 22-25, 148-151, 309-312; |
| | | | 526-534, 1.101; 6-19, 1.097; | Myristyl 40-45, 75-80, |
| | | | 298-304, 1.095; 1091-1107, 1.095; | 76-81, 115-120, 170-175, |
| | | | 908-926, 1.094; 1029-1052, 1.091; | 173-178, 174-179, 255-260, |
| | | | 62-72, 1.091; 252-265, 1.087; | 449-454, 552-557, 595-600, |
| | | | 202-220, 1.087; 138-144, 1.082; | 668-673, 809-814, 846-851; |
| | | | 725-731, 1.082; 1014-1022, 1.079; | Pkc_Phospho_Site 153-155, |
| | | | 707-715, 1.074; 845-851, 1.073; | 177-179, 218-220, 233-235, |
| | | | 615-622, 1.067; 1122-1129, 1.067; | 246-248, 278-280, 452-454, |
| | | | 404-410, 1.066; 279-287, 1.063; | 574-576, 588-590, 655-657, |
| | | | 1309-1319, 1.059; 148-154, 1.058; | 891-893, 921-923, 982-984; |
| | | | 1001-1007, 1.057; 384-390, 1.056; | Prokar_Lipoprotein 314-324; |
| | | | 1201-1207, 1.055; 583-589, 1.048; | Protein_Kinase_St 705-717; |
| | | | 717-723, 1.043; 562-573, 1.042 | |
| DEX0377_41.aa.14 | N | 0 -o | 780-794, 1.208; 637-648, 1.181; | Amidation 297-300; |
| | | | 685-703, 1.173; 75-108, 1.163; | Asn_Glycosylation 571-574; |
| | | | 231-238, 1.162; 472-498, 1.16; | Camp_Phospho_Site 139-142, |
| | | | 591-600, 1.16; 373-380, 1.136; | 168-171, 226-229, 299-302; |
| | | | 172-185, 1.135; 750-768, 1.135; | Ck2_Phospho_Site 42-45, |
| | | | 820-834, 1.133; 25-36, 1.129; | 48-51, 52-55, 119-122, |
| | | | 334-348, 1.127; 312-332, 1.123; | 142-145, 218-221, 229-232, |
| | | | 412-464, 1.122; 651-659, 1.12; | 274-277, 325-328, 338-341, |
| | | | 502-510, 1.118; 802-808, 1.111; | 583-586, 638-641, 802-805, |
| | | | 623-630, 1.105; 123-131, 1.102; | 879-882, 884-887, 888-891, |
| | | | 525-533, 1.101; 6-19, 1.097; | 898-901, 904-907, 936-939; |
| | | | 298-304, 1.095; 907-921, 1.094; | Glycosaminoglycan 22-25, |
| | | | 62-72, 1.091; 252-265, 1.087; | 148-151, 309-312; Myristyl |
| | | | 202-220, 1.087; 138-144, 1.082; | 40-45, 75-80, 76-81, 115-120, |
| | | | 724-730, 1.082; 706-714, 1.074; | 170-175, 173-178, 174-179, |
| | | | 844-850, 1.073; 614-621, 1.067; | 255-260, 449-454, 551-556, |
| | | | 404-410, 1.066; 279-287, 1.063; | 594-599, 667-672, 808-813, |
| | | | 148-154, 1.058; 384-390, 1.056; | 845-850; Pkc_Phospho_Site |
| | | | 582-588, 1.048; 716-722, 1.043; | 153-155, 177-179, 218-220, |
| | | | 561-572, 1.042 | 233-235, 246-248, 278-280, |
| | | | | 452-454, 573-575, 587-589, |
| | | | | 654-656, 890-892, 920-922; |
| | | | | Prokar_Lipoprotein 314-324; |
| | | | | Protein_Kinase_St 704-716; |
| DEX0377_41.aa.17 | N | 0 -o | 75-108, 1.163; 231-238, 1.162; | Amidation 297-300; |
| | | | 172-185, 1.135; 25-36, 1.129; | Camp_Phospho_Site 139-142, |
| | | | 123-131, 1.102; 6-19, 1.097; | 168-171, 226-229, 299-302; |
| | | | 298-304, 1.095; 62-72, 1.091; | Ck2_Phospho_Site 42-45, |
| | | | 252-265, 1.087; 202-220, 1.087; | 48-51, 52-55, 119-122, |
| | | | 138-144, 1.082; 279-287, 1.063; | 142-145, 218-221, 229-232, |
| | | | 148-154, 1.058 | 274-277; Glycosaminoglycan |
| | | | | 22-25, 148-151, 309-312; |
| | | | | Myristyl 40-45, 75-80, |
| | | | | 76-81, 115-120, 170-175, |
| | | | | 173-178, 174-179, 255-260; |
| | | | | Pkc_Phospho_Site 153-155, |
| | | | | 177-179, 218-220, 233-235, |
| | | | | 246-248, 278-280; |
| DEX0377_41.aa.18 | N | 0 -o | 75-108, 1.163; 172-185, 1.135; | Camp_Phospho_Site 139-142, |
| | | | 25-36, 1.129; 222-229, 1.12; | 168-171, 226-229; |
| | | | 123-131, 1.102; 6-19, 1.097; | Ck2_Phospho_Site 42-45, |
| | | | 62-72, 1.091; 202-220, 1.087; | 48-51, 52-55, 119-122, |
| | | | 138-144, 1.082; 148-154, 1.058 | 142-145, 218-221, 234-237; |
| | | | | Glycosaminoglycan 22-25, |
| | | | | 148-151; Myristyl 40-45, |
| | | | | 75-80, 76-81, 115-120, |
| | | | | 170-175, 173-178, 174-179; |
| | | | | Pkc_Phospho_Site 153-155, |
| | | | | 177-179, 218-220, 244-246; |
| DEX0377_41.aa.19 | N | 0 -o | 250-269, 1.163; 75-108, 1.163; | Camp_Phospho_Site 139-142, |
| | | | 231-238, 1.144; 172-185, 1.135; | 168-171, 226-229, 241-244; |
| | | | 25-36, 1.129; 123-131, 1.102; | Ck2_Phospho_Site 42-45, |
| | | | 6-19, 1.097; 62-72, 1.091; | 48-51, 52-55, 119-122, |
| | | | 202-220, 1.087; 138-144, 1.082; | 142-145, 218-221, 229-232; |
| | | | 148-154, 1.058; 240-247, 1.053 | Glycosaminoglycan 22-25, |
| | | | | 148-151; Myristyl 40-45, |
| | | | | 75-80, 76-81, 115-120, |
| | | | | 170-175, 173-178, 174-179; |
| | | | | Pkc_Phospho_Site 153-155, |
| | | | | 177-179, 218-220, 233-235, |
| | | | | 244-246; |
| DEX0377_41.aa.20 | N | 0 -o | 202-254, 1.212; 75-108, 1.163; | Camp_Phospho_Site 139-142, |
| | | | 172-185, 1.135; 25-36, 1.129; | 168-171; Ck2_Phospho_Site |
| | | | 123-131, 1.102; 6-19, 1.097; | 42-45, 48-51, 52-55, |
| | | | 62-72, 1.091; 138-144, 1.082; | 119-122, 142-145; |
| | | | 148-154, 1.058 | Glycosaminoglycan 22-25, |
| | | | | 148-151; Myristyl 40-45, |
| | | | | 75-80, 76-81, 115-120, |
| | | | | 170-175, 173-178, 174-179, |
| | | | | 233-238, 234-239; |
| | | | | Pkc_Phospho_Site 153-155, |
| | | | | 177-179; |
| DEX0377_41.aa.21 | y | 0 -o | 196-213, 1.178; 69-102, 1.163; | Camp_Phospho_Site 133-136, |
| | | | 166-179, 1.135; 19-30, 1.129; | 162-165; Ck2_Phospho_Site |
| | | | 117-125, 1.102; 4-13, 1.097; | 36-39, 42-45, 46-49, |
| | | | 56-66, 1.091; 132-138, 1.082; | 113-116, 136-139; |
| | | | 142-148, 1.058 | Glycosaminoglycan 16-19, |
| | | | | 142-145; Myristyl 34-39, |
| | | | | 69-74, 70-75, 109-114, |
| | | | | 164-169, 167-172, 168-173; |
| | | | | Pkc_Phospho_Site 147-149, |
| | | | | 171-173; |
| DEX0377_43.aa.5 | N | 0 -o | 287-312, 1.281; 172-184, 1.202; | Amidation 118-121; |
| | | | 193-225, 1.177; 232-243, 1.175; | Asn_Glycosylation 232-235; |
| | | | 55-64, 1.17; 137-170, 1.136; | Camp_Phospho_Site 40-43; |
| | | | 105-112, 1.109; 263-276, 1.09; | Ck2_Phospho_Site 20-23, |
| | | | 25-33, 1.089; 68-75, 1.084; | 39-42, 43-46, 53-56, |
| | | | 255-261, 1.083; 84-99, 1.054; | 288-291; Pkc_Phospho_Site |
| | | | 115-121, 1.031 | 39-41, 213-215, 272-274; |
| | | | | Lim_Domain_1 157-190, |
| | | | | 216-249, 275-308; |
| DEX0377_43.aa.8 | N | 0 -o | 81-100, 1.243; 4-37, 1.181; | Camp_Phospho_Site 19-22, |
| | | | 108-118, 1.152; 49-58, 1.141; | 64-67; Ck2_Phospho_Site |
| | | | 61-70, 1.135; 72-79, 1.072 | 47-50; Myristyl 73-78; |
| | | | | Pkc_Phospho_Site 77-79; |
| | | | | Tyr_Phospho_Site 54-61, |
| | | | | 108-115; Fkbp_Ppiase_1 |
| | | | | 95-111; Lim_Domain_1 |
| | | | | 69-102; |
| DEX0377_46.aa.5 | N | 0 -i | 118-128, 1.175; 24-41, 1.164; | Ck2_Phospho_Site 16-19, |
| | | | 104-111, 1.118; 71-79, 1.117; | 53-56, 96-99; Myristyl |
| | | | 49-69, 1.103; 5-22, 1.084; | 137-142; Pkc_Phospho_Site |
| | | | 86-101, 1.081 | 53-55, 96-98, 134-136; |
| DEX0377_46.aa.6 | N | 0 -o | 24-41, 1.164; 71-79, 1.117; | Ck2_Phospho_Site 16-19, |
| | | | 86-104, 1.113; 49-69, 1.103; | 53-56, 96-99; |
| | | | 5-22, 1.084 | Pkc_Phospho_Site 53-55, |
| | | | | 96-98; |
| DEX0377_46.aa.10 | y | 0 -o | 342-353, 1.223; 4-14, 1.207; | Asn_Glycosylation 107-110, |
| | | | 357-374, 1.192; 318-329, 1.19; | 134-137, 308-311; |
| | | | 204-213, 1.142; 254-264, 1.138; | Camp_Phospho_Site 39-42, |
| | | | 133-144, 1.121; 114-120, 1.111; | 40-43; Ck2_Phospho_Site |
| | | | 273-288, 1.111; 159-165, 1.094; | 31-34, 42-45, 43-46, |
| | | | 218-231, 1.092; 43-55, 1.084; | 60-63, 76-79, 114-117, |
| | | | 82-88, 1.06; 246-252, 1.054 | 126-129, 136-139, 155-158, |
| | | | | 181-184, 186-189, 191-194, |
| | | | | 192-195, 234-237, 301-304, |
| | | | | 314-317, 330-333; Myristyl |
| | | | | 96-101; Pkc_Phospho_Site |
| | | | | 37-39, 38-40, 75-77, |
| | | | | 103-105, 163-165, 208-210; |
| DEX0377_46.aa.12 | N | 0 -o | 344-355, 1.223; 359-376, 1.192; | Asn_Glycosylation 109-112, |
| | | | 320-331, 1.19; 206-215, 1.142; | 136-139, 310-313; |
| | | | 256-266, 1.138; 11-27, 1.134; | Camp_Phospho_Site 41-44, |
| | | | 135-146, 1.121; 116-122, 1.111; | 42-45; Ck2_Phospho_Site |
| | | | 275-290, 1.111; 161-167, 1.094; | 33-36, 44-47, 45-48, |
| | | | 220-233, 1.092; 45-57, 1.084; | 62-65, 78-81, 116-119, |
| | | | 84-90, 1.06; 248-254, 1.054 | 128-131, 138-141, 157-160, |
| | | | | 183-186, 188-191, 193-196, |
| | | | | 194-197, 236-239, 303-306, |
| | | | | 316-319, 332-335; Myristyl |
| | | | | 98-103; Pkc_Phospho_Site |
| | | | | 39-41, 40-42, 77-79, |
| | | | | 105-107, 165-167, 210-212; |
| DEX0377_46.aa.14 | N | 0 -o | 24-41, 1.164; 328-340, 1.15; | Asn_Glycosylation 220-223, |
| | | | 246-257, 1.121; 104-111, 1.118; | 247-250; Camp_Phospho_Site |
| | | | 71-79, 1.117; 227-233, 1.111; | 152-155, 153-156; |
| | | | 49-69, 1.103; 272-278, 1.094; | Ck2_Phospho_Site 16-19, |
| | | | 117-125, 1.088; 5-22, 1.084; | 53-56, 96-99, 144-147, |
| | | | 156-168, 1.084; 86-101, 1.081; | 155-158, 156-159, 173-176, |
| | | | 195-201, 1.06 | 189-192, 227-230, 239-242, |
| | | | | 249-252, 268-271, 294-297, |
| | | | | 299-302, 304-307, 305-308; |
| | | | | Myristyl 209-214; |
| | | | | Pkc_Phospho_Site 53-55, |
| | | | | 96-98, 150-152, 151-153, |
| | | | | 188-190, 216-218, 276-278, |
| | | | | 321-323; |
| DEX0377_46.aa.16 | N | 1 -i125-147o | 118-145, 1.241; 24-41, 1.164; | Ck2_Phospho_Site 16-19, |
| | | | 104-111, 1.118; 71-79, 1.117; | 53-56, 96-99; |
| | | | 49-69, 1.103; 5-22, 1.084; | Pkc_Phospho_Site 53-55, |
| | | | 86-101, 1.081 | 96-98; |
| DEX0377_49.aa.4 | N | 0 -o | 110-118, 1.164; 77-83, 1.088; | Ck2_Phospho_Site 5-8, |
| | | | 35-41, 1.05; 55-61, 1.042 | 21-24, 55-58, 97-100, |
| | | | | 109-112; Pkc_Phospho_Site |
| | | | | 86-88, 109-111; |
| DEX0377_49.aa.5 | N | 0 -o | 31-64, 1.228; 70-95, 1.178 | Amidation 27-30; |
| | | | | Asn_Glycosylation 13-16; |
| | | | | Myristyl 34-39, 74-79; |
| DEX0377_49.aa.6 | N | 0 -o | 59-92, 1.228; 30-37, 1.16; | Amidation 28-31, 55-58; |
| | | | 98-112, 1.148 | Camp_Phospho_Site 21-24; |
| | | | | Myristyl 35-40, 62-67, |
| | | | | 102-107; Pkc_Phospho_Site |
| | | | | 26-28; |
| DEX0377_49.aa.7 | N | 0 -o | 135-168, 1.228; 174-199, 1.178; | Amidation 131-134; |
| | | | 80-89, 1.164; 33-78, 1.156; | Camp_Phospho_Site 7-10; |
| | | | 14-31, 1.144; 6-12, 1.071; | Ck2_Phospho_Site 93-96; |
| | | | 106-112, 1.064 | Myristyl 71-76, 138-143, |
| | | | | 178-183; Pkc_Phospho_Site |
| | | | | 62-64, 93-95; |
| DEX0377_49.aa.8 | N | 0 -o | 92-139, 1.262; 31-64, 1.167; | Amidation 5-8, 16-19; |
| | | | 190-197, 1.142; 152-164, 1.142; | Camp_Phospho_Site 9-12; |
| | | | 67-73, 1.097; 80-86, 1.049 | Ck2_Phospho_Site 23-26, |
| | | | | 24-27, 74-77, 170-173; |
| | | | | Myristyl 34-39, 36-41, |
| | | | | 55-60; Pkc_Phospho_Site |
| | | | | 23-25, 47-49, 80-82, |
| | | | | 129-131, 180-182; |
| DEX0377_49.aa.9 | N | 0 -i | 30-39, 1.16; 58-75, 1.157 | Amidation 28-31, 55-58; |
| | | | | Camp_Phospho_Site 21-24; |
| | | | | Ck2_Phospho_Site 76-79; |
| | | | | Myristyl 35-40, 62-67; |
| | | | | Pkc_Phospho_Site 26-28; |
| DEX0377_49.aa.10 | N | 0 -o | 59-92, 1.228; 98-123, 1.178; | Amidation 28-31, 55-58; |
| | | | 30-37, 1.16 | Camp_Phospho_Site 21-24; |
| | | | | Myristyl 35-40, 62-67, |
| | | | | 102-107; Pkc_Phospho_Site |
| | | | | 26-28; |
| DEX0377_49.aa.11 | N | 0 -o | 110-118, 1.164; 77-83, 1.088; | Ck2_Phospho_Site 5-8, |
| | | | 35-41, 1.05; 55-61, 1.042 | 21-24, 55-58, 97-100, |
| | | | | 109-112; Pkc_Phospho_Site |
| | | | | 86-88, 109-111; |
| DEX0377_49.aa.12 | N | 0 -o | 192-200, 1.164; 30-39, 1.16; | Amidation 28-31; |
| | | | 50-69, 1.117; 159-165, 1.088; | Camp_Phospho_Site 21-24; |
| | | | 117-123, 1.05; 137-143, 1.042 | Ck2_Phospho_Site 48-51, |
| | | | | 73-76, 90-93, 103-106, |
| | | | | 137-140, 179-182, 191-194; |
| | | | | Myristyl 35-40; |
| | | | | Pkc_Phospho_Site 26-28, |
| | | | | 73-75, 168-170, 191-193; |
| DEX0377_49.aa.13 | N | 0 -o | 32-65, 1.228; 71-96, 1.178 | Amidation 28-31; |
| | | | | Ck2_Phospho_Site 14-17; |
| | | | | Myristyl 35-40, 75-80; |
| DEX0377_49.aa.15 | N | 0 -i | 30-39, 1.16; 58-75, 1.157 | Amidation 28-31, 55-58; |
| | | | | Camp_Phospho_Site 21-24; |
| | | | | Myristyl 35-40, 62-67; |
| | | | | Pkc_Phospho_Site 26-28; |
| DEX0377_50.aa.2 | N | 0 -o | 26-32, 1.033 | Pkc_Phospho_Site 16-18; |
| DEX0377_56.aa.3 | N | 0 -o | 4-15, 1.135; 39-49, 1.123; | Asn_Glycosylation 43-46, |
| | | | 100-106, 1.099; 19-25, 1.085 | 58-61; Camp_Phospho_Site |
| | | | | 74-77; Ck2_Phospho_Site |
| | | | | 12-15, 21-24, 54-57; |
| | | | | Pkc_Phospho_Site 63-65, |
| | | | | 73-75, 77-79; |
| DEX0377_56.aa.4 | N | 1 -o28-50i | 14-71, 1.246; 74-85, 1.136; | Asn_Glycosylation 38-41; |
| | | | 87-101, 1.119; 106-113, 1.091 | Camp_Phospho_Site 77-80; |
| | | | | Ck2_Phospho_Site 15-18; |
| | | | | Pkc_Phospho_Site 15-17, |
| | | | | 64-66; Rgd 100-102; |
| DEX0377_56.aa.7 | N | 0 -o | 45-62, 1.191; 92-103, 1.153; | Amidation 47-50, 71-74; |
| | | | 4-14, 1.15; 70-81, 1.101 | Asn_Glycosylation 87-90; |
| | | | | Ck2_Phospho_Site 90-93; |
| | | | | Myristyl 47-52; |
| | | | | Pkc_Phospho_Site 21-23, |
| | | | | 94-96; |
| DEX0377_56.aa.11 | N | 0 -o | 4-15, 1.135; 39-49, 1.123; | Zinc_Finger_C2h2 138-158, |
| | | | 158-167, 1.097; 19-25, 1.085; | 166-186; Asn_Glycosylation |
| | | | 133-139, 1.082; 141-152, 1.082; | 43-46, 58-61; |
| | | | 105-111, 1.066 | Camp_Phospho_Site 74-77; |
| | | | | Ck2_Phospho_Site 12-15, |
| | | | | 21-24, 54-57; Myristyl |
| | | | | 176-181; Pkc_Phospho_Site |
| | | | | 63-65, 73-75, 77-79; |
| DEX0377_56.aa.12 | N | 0 -o | 45-84, 1.191; 89-101, 1.165; | Amidation 47-50; |
| | | | 4-14, 1.15; 105-119, 1.133; | Ck2_Phospho_Site 69-72, |
| | | | 121-129, 1.054 | 122-125; Myristyl 47-52; |
| | | | | Pkc_Phospho_Site 21-23, |
| | | | | 133-135; |
| DEX0377_56.aa.13 | N | 0 -o | 45-84, 1.191; 131-148, 1.176; | Amidation 47-50; |
| | | | 89-111, 1.165; 4-14, 1.15; | Ck2_Phospho_Site 69-72; |
| | | | 118-129, 1.102 | Myristyl 47-52, 109-114; |
| | | | | Pkc_Phospho_Site 21-23, |
| | | | | 126-128; |
| DEX0377_57.aa.2 | N | 0 -i | 4-15, 1.217; 21-28, 1.09 | Ck2_Phospho_Site 19-22; |
| DEX0377_69.aa.2 | N | 0 -i | 15-23, 1.047 | Camp_Phospho_Site 15-18; |
| DEX0377_74.aa.7 | N | 0 -o | 317-346, 1.186; 525-534, 1.183; | Asn_Glycosylation 73-76; |
| | | | 72-89, 1.176; 432-456, 1.173; | Camp_Phospho_Site 24-27; |
| | | | 511-520, 1.165; 242-271, 1.154; | Ck2_Phospho_Site 16-19, |
| | | | 136-152, 1.15; 98-113, 1.148; | 17-20, 18-21, 52-55, |
| | | | 277-306, 1.142; 196-210, 1.127; | 86-89, 100-103, 116-119, |
| | | | 58-69, 1.126; 214-238, 1.114; | 122-125, 400-403, 487-490, |
| | | | 39-46, 1.098; 370-379, 1.098; | 502-505, 509-512, 525-528, |
| | | | 500-506, 1.091; 354-362, 1.084; | 527-530; Myristyl 28-33, |
| | | | 424-430, 1.076; 30-37, 1.076; | 132-137, 313-318; |
| | | | 179-185, 1.073; 468-474, 1.072; | Pkc_Phospho_Site 29-31, |
| | | | 381-394, 1.07; 398-406, 1.065; | 44-46, 52-54, 182-184, |
| | | | 187-194, 1.036 | 397-399, 424-426, 527-529; |
| | | | | Tyr_Phospho_Site 524-532; |
| DEX0377_74.aa.8 | N | 0 -o | 229-258, 1.186; 4-33, 1.186; | Ck2_Phospho_Site 76-79, |
| | | | 437-446, 1.183; 344-368, 1.173; | 312-315, 399-402, 414-417, |
| | | | 423-432, 1.165; 154-183, 1.154; | 421-424, 437-440, 439-442; |
| | | | 92-106, 1.152; 189-218, 1.142; | Glycosaminoglycan 86-89; |
| | | | 108-122, 1.127; 37-51, 1.121; | Myristyl 87-92, 98-103, |
| | | | 126-150, 1.114; 282-291, 1.098; | 225-230; Pkc_Phospho_Site |
| | | | 412-418, 1.091; 266-274, 1.084; | 31-33, 309-311, 336-338, |
| | | | 57-70, 1.079; 336-342, 1.076; | 439-441; Tyr_Phospho_Site |
| | | | 380-386, 1.072; 293-306, 1.07; | 436-444; |
| | | | 310-318, 1.065 | |
| DEX0377_74.aa.10 | N | 0 -o | 72-89, 1.176; 98-113, 1.148; | Asn_Glycosylation 73-76; |
| | | | 58-69, 1.126; 39-46, 1.098; | Camp_Phospho_Site 24-27; |
| | | | 30-37, 1.076 | Ck2_Phospho_Site 16-19, |
| | | | | 17-20, 18-21, 52-55, |
| | | | | 86-89, 100-103, 116-119; |
| | | | | Myristyl 28-33; |
| | | | | Pkc_Phospho_Site 29-31, |
| | | | | 44-46, 52-54; |
| DEX0377_74.aa.13 | N | 0 -o | 56-74, 1.125; 76-86, 1.12; | Ck2_Phospho_Site 47-50, |
| | | | 102-109, 1.101; 15-36, 1.08 | 99-102; Pkc_Phospho_Site |
| | | | | 17-19, 26-28, 57-59, |
| | | | | 119-121; |
| DEX0377_74.aa.14 | N | 0 -o | 207-236, 1.186; 465-474, 1.183; | Asn_Glycosylation 257-260; |
| | | | 372-396, 1.173; 451-460, 1.165; | Ck2_Phospho_Site 12-15, |
| | | | 132-161, 1.154; 26-42, 1.15; | 244-247, 259-262, 340-343, |
| | | | 167-196, 1.142; 86-100, 1.127; | 427-430, 442-445, 449-452, |
| | | | 104-128, 1.114; 264-271, 1.108; | 465-468, 467-470; Myristyl |
| | | | 310-319, 1.098; 440-446, 1.091; | 3-8, 22-27, 203-208; |
| | | | 276-288, 1.088; 294-302, 1.084; | Pkc_Phospho_Site 72-74, |
| | | | 364-370, 1.076; 69-75, 1.073; | 259-261, 337-339, 364-366, |
| | | | 408-414, 1.072; 321-334, 1.07; | 467-469; Tyr_Phospho_Site |
| | | | 338-346, 1.065; 77-84, 1.036 | 464-472; |
| DEX0377_74.aa.16 | N | 0 -o | 344-363, 1.217; 207-236, 1.186; | Ck2_Phospho_Site 12-15, |
| | | | 322-340, 1.173; 132-161, 1.154; | 290-293; Myristyl 3-8, |
| | | | 26-42, 1.15; 167-196, 1.142; | 22-27, 203-208; |
| | | | 86-100, 1.127; 104-128, 1.114; | Pkc_Phospho_Site 72-74, |
| | | | 260-269, 1.098; 244-252, 1.084; | 287-289, 314-316; |
| | | | 314-320, 1.076; 69-75, 1.073; | |
| | | | 271-284, 1.07; 288-296, 1.065; | |
| | | | 77-84, 1.036 | |
| DEX0377_77.aa.5 | N | 0 -o | 38-51, 1.167; 61-67, 1.067 | Asn_Glycosylation 41-44; |
| | | | | Ck2_Phospho_Site 35-38; |
| | | | | Leucine_Zipper 40-61; |
| | | | | Pkc_Phospho_Site 65-67; |
| DEX0377_77.aa.6 | N | 0 -o | 44-55, 1.186; 102-117, 1.179; | Atp_Gtp_A 59-66; |
| | | | 76-100, 1.172; 32-41, 1.151; | Ck2_Phospho_Site 30-33, |
| | | | 59-71, 1.15; 4-11, 1.125; | 35-38, 113-116; |
| | | | 18-26, 1.068 | Myristyl 107-112; |
| | | | | Pkc_Phospho_Site 48-50; |
| DEX0377_77.aa.8 | N | 0 -o | 242-277, 1.201; 50-59, 1.162; | Somatotropin_2 262-279; |
| | | | 151-167, 1.162; 67-105, 1.156; | Asn_Glycosylation 142-145; |
| | | | 41-48, 1.143; 7-19, 1.141; | Camp_Phospho_Site 152-155; |
| | | | 281-311, 1.138; 114-121, 1.137; | Ck2_Phospho_Site 144-147, |
| | | | 196-217, 1.137; 221-239, 1.136; | 194-197, 225-228, 308-311; |
| | | | 182-188, 1.129; 320-354, 1.106; | Myristyl 176-181, 249-254, |
| | | | 169-175, 1.105 | 336-341, 340-345, 362-367; |
| | | | | Pkc_Phospho_Site 82-84, |
| | | | | 86-88; |
| DEX0377_77.aa.9 | N | 0 -o | 65-100, 1.201; 104-134, 1.138; | Somatotropin_2 85-102; |
| | | | 19-40, 1.137; 44-62, 1.136; | Ck2_Phospho_Site 17-20, |
| | | | 5-11, 1.129; 143-152, 1.097; | 48-51, 131-134; Myristyl |
| | | | 162-171, 1.073 | 72-77; Pkc_Phospho_Site |
| | | | | 176-178; |
| DEX0377_77.aa.10 | N | 0 -o | 133-140, 1.159; 116-126, 1.149; | Myristyl 59-64; |
| | | | 28-42, 1.143; 93-100, 1.137; | Pkc_Phospho_Site |
| | | | 61-84, 1.108; 9-15, 1.08; | 45-47, 65-67; |
| | | | 46-53, 1.074 | |
| DEX0377_77.aa.11 | N | 0 -o | 50-59, 1.162; 154-161, 1.159; | Pkc_Phospho_Site |
| | | | 67-105, 1.156; 137-147, 1.149; | 82-84, 86-88; |
| | | | 41-48, 1.143; 7-19, 1.141; | |
| | | | 114-121, 1.137 | |
| DEX0377_84.aa.2 | N | 0 -o | 53-66, 1.119; 11-18, 1.099; | Ck2_Phospho_Site 24-27, |
| | | | 68-78, 1.095; 25-47, 1.089 | 66-69; Pkc_Phospho_Site |
| | | | | 90-92; |
| DEX0377_84.aa.4 | N | 0 -o | 208-229, 1.254; 32-105, 1.227; | Asn_Glycosylation |
| | | | 123-135, 1.209; 293-339, 1.202; | 166-169, 173-176, 337-340; |
| | | | 261-290, 1.184; 4-30, 1.176; | Ck2_Phospho_Site 33-36, |
| | | | 245-259, 1.164; 108-117, 1.16; | 51-54, 175-178, 326-329, |
| | | | 151-169, 1.151; 138-147, 1.149; | 412-415; Myristyl 110-115, |
| | | | 176-206, 1.129; 236-243, 1.121; | 145-150, 367-372; |
| | | | 350-362, 1.096 | Pkc_Phospho_Site 111-113, |
| | | | | 190-192, 368-370, 371-373, |
| | | | | 401-403; Tyr_Phospho_Site |
| | | | | 242-250; Prokar_Lipoprotein |
| | | | | 66-76; |
| DEX0377_84.aa.5 | N | 0 -o | 389-411, 1.243; 312-337, 1.189; | Atp_Gtp_A 218-225; |
| | | | 190-215, 1.18; 417-437, 1.174; | Amidation 155-158, 554-557; |
| | | | 236-250, 1.164; 252-265, 1.152; | Camp_Phospho_Site 543-546; |
| | | | 443-468, 1.129; 140-147, 1.122; | Ck2_Phospho_Site 24-27, |
| | | | 53-66, 1.119; 270-289, 1.119; | 66-69, 116-119, 251-254, |
| | | | 293-304, 1.107; 11-18, 1.099; | 262-265, 500-503, 542-545; |
| | | | 160-166, 1.098; 68-78, 1.095; | Myristyl 144-149, 221-226, |
| | | | 341-359, 1.091; 25-47, 1.089; | 299-304, 324-329, 400-405, |
| | | | 472-487, 1.085; 222-229, 1.084; | 450-455, 479-484, 554-559; |
| | | | 496-509, 1.08; 181-187, 1.065 | Pkc_Phospho_Site 90-92, |
| | | | | 116-118, 251-253, 340-342, |
| | | | | 412-414, 541-543, 542-544; |
| | | | | Tyr_Phospho_Site 350-358; |
| DEX0377_85.aa.3 | N | 0 -o | 4-16, 1.122; 28-34, 1.078; | Ck2_Phospho_Site 39-42, |
| | | | 43-49, 1.053 | 54-57, 55-58; Myristyl |
| | | | | 15-20; Pkc_Phospho_Site |
| | | | | 39-41, 54-56; |
| DEX0377_90.aa.12 | y | 1 -o25-47i | 4-66, 1.198; 72-81, 1.163; | Leucine_Zipper 34-55, |
| | | | 91-98, 1.133; 83-89, 1.059 | 41-62; Myristyl 49-54, |
| | | | | 88-93; |

### Example 2

### Relative Quantitation of Gene Expression

[0425] Real-Time quantitative PCR with fluorescent Taqman® probes is a quantitation detection system utilizing the 5′-3′ nuclease activity of Taq DNA polymerase. The method uses an internal fluorescent oligonucleotide probe (Taqman®) labeled with a 5′ reporter dye and a downstream, 3′ quencher dye. During PCR, the 5′-3′ nuclease activity of Taq DNA polymerase releases the reporter, whose fluorescence can then be detected by the laser detector of the Model 7700 Sequence Detection System (PE Applied Biosystems, Foster City, Calif., USA). Amplification of an endogenous control is used to standardize the amount of sample RNA added to the reaction and normalize for Reverse Transcriptase (RT) efficiency. Either cyclophilin, glyceraldehyde-3-phosphate dehydrogenase (GAPDH), ATPase, or 18S ribosomal RNA (rRNA) is used as this endogenous control. To calculate relative quantitation between all the samples studied, the target RNA levels for one sample were used as the basis for comparative results (calibrator). Quantitation relative to the “calibrator” can be obtained using the comparative method (User Bulletin #2: ABI PRISM 7700 Sequence Detection System).

[0426] The tissue distribution and the level of the target gene are evaluated for every sample in normal and cancer tissues. Total RNA is extracted from normal tissues, cancer tissues, and from cancers and the corresponding matched adjacent tissues. Subsequently, first strand cDNA is prepared with reverse transcriptase and the polymerase chain reaction is done using primers and Taqman® probes specific to each target gene. The results are analyzed using the ABI PRISM 7700 Sequence Detector. The absolute numbers are relative levels of expression of the target gene in a particular tissue compared to the calibrator tissue.

[0427] One of ordinary skill can design appropriate primers. The relative levels of expression of the ESNA versus normal tissues and other cancer tissues can then be determined. All the values are compared to the calibrator. Normal RNA samples are commercially available pools, originated by pooling samples of a particular tissue from different individuals.

[0428] The relative levels of expression of the ESNA in pairs of matched samples may also be determined. A matched pair is formed by mRNA from the cancer sample for a particular tissue and mRNA from the normal adjacent sample for that same tissue from the same individual. All the values are compared to the calibrator.

[0429] In the analysis of matching samples, the ESNAs that show a high degree of tissue specificity for the tissue of interest. These results confirm the tissue specificity results obtained with normal pooled samples. Further, the level of mRNA expression in cancer samples and the isogenic normal adjacent tissue from the same individual are compared. This comparison provides an indication of specificity for the cancer state (e.g. higher levels of mRNA expression in the cancer sample compared to the normal adjacent).

[0430] Altogether, the high level of tissue specificity, plus the mRNA overexpression in matched samples tested are indicative of SEQ ID NO: 1-472 being a diagnostic marker for cancer.

### Example 3

### Protein Expression

[0431] The ESNA is amplified by polymerase chain reaction (PCR) and the amplified DNA fragment encoding the ESNA is subcloned in pET-21d for expression in E. coli. In addition to the ESNA coding sequence, codons for two amino acids, Met-Ala, flanking the NH₂-terminus of the coding sequence of ESNA, and six histidines, flanking the COOH-terminus of the coding sequence of ESNA, are incorporated to serve as initiating Met/restriction site and purification tag, respectively.

[0432] An over-expressed protein band of the appropriate molecular weight may be observed on a Coomassie blue stained polyacrylamide gel. This protein band is confirmed by Western blot analysis using monoclonal antibody against 6× Histidine tag.

[0433] Large-scale purification of ESP is achieved using cell paste generated from 6-liter bacterial cultures, and purified using immobilized metal affinity chromatography (IMAC). Soluble fractions that are separated from total cell lysate were incubated with a nickel chelating resin. The column is packed and washed with five column volumes of wash buffer. ESP is eluted stepwise with various concentration imidazole buffers.

### Example 4

### Fusion Proteins

[0434] The human Fc portion of the IgG molecule can be PCR amplified, using primers that span the 5′ and 3′ ends of the sequence described below. These primers also should have convenient restriction enzyme sites that will facilitate cloning into an expression vector, preferably a mammalian expression vector. For example, if pC4 (Accession No. 209646) is used, the human Fc portion can be ligated into the BamHI cloning site. Note that the 3′ BamHI site should be destroyed. Next, the vector containing the human Fc portion is re-restricted with BamHI, linearizing the vector, and a polynucleotide of the present invention, isolated by the PCR protocol described in Example 2, is ligated into this BamHI site. Note that the polynucleotide is cloned without a stop codon, otherwise a fusion protein will not be produced. If the naturally occurring signal sequence is used to produce the secreted protein, pC4 does not need a second signal peptide. Alternatively, if the naturally occurring signal sequence is not used, the vector can be modified to include a heterologous signal sequence. See, e.g., WO 96/34891.

### Example 5

### Production of an Antibody from a Polypeptide

[0435] In general, such procedures involve immunizing an animal (preferably a mouse) with polypeptide or, more preferably, with a secreted polypeptide-expressing cell. Such cells may be cultured in any suitable tissue culture medium; however, it is preferable to culture cells in Earle's modified Eagle's medium supplemented with 10% fetal bovine serum (inactivated at about 56° C.), and supplemented with about 10 g/l of nonessential amino acids, about 1,000 U/ml of penicillin, and about 100, μg/ml of streptomycin. The splenocytes of such mice are extracted and fused with a suitable myeloma cell line. Any suitable myeloma cell line may be employed in accordance with the present invention; however, it is preferable to employ the parent myeloma cell line (SP20), available from the ATCC. After fusion, the resulting hybridoma cells are selectively maintained in HAT medium, and then cloned by limiting dilution as described by Wands et al, Gastroenterology 80: 225-232 (1981).

[0436] The hybridoma cells obtained through such a selection are then assayed to identify clones which secrete antibodies capable of binding the polypeptide. Alternatively, additional antibodies capable of binding to the polypeptide can be produced in a two-step procedure using anti-idiotypic antibodies. Such a method makes use of the fact that antibodies are themselves antigens, and therefore, it is possible to obtain an antibody which binds to a second antibody. In accordance with this method, protein specific antibodies are used to immunize an animal, preferably a mouse. The splenocytes of such an animal are then used to produce hybridoma cells, and the hybridoma cells are screened to identify clones which produce an antibody whose ability to bind to the protein-specific antibody can be blocked by the polypeptide. Such antibodies comprise anti-idiotypic antibodies to the protein specific antibody and can be used to immunize an animal to induce formation of further protein-specific antibodies.

### Example 6

### Method of Determining Alterations in a Gene Corresponding to a Polynucleotide

[0437] RNA is isolated from individual patients or from a family of individuals that have a phenotype of interest. cDNA is then generated from these RNA samples using protocols known in the art. See, Sambrook (2001), supra. The cDNA is then used as a template for PCR, employing primers surrounding regions of interest in SEQ ID NO: 1472. Suggested PCR conditions consist of 35 cycles at 95° C. for 30 seconds; 60-120 seconds at 52-58° C.; and 60-120 seconds at 70° C., using buffer solutions described in Sidransky et al., Science 252(5006): 706-9 (1991). See also Sidransky et al., Science 278(5340): 1054-9 (1997).

[0438] PCR products are then sequenced using primers labeled at their 5′ end with T4 polynucleotide kinase, employing SequiTherm Polymerase. (Epicentre Technologies). The intron-exon borders of selected exons are also determined and genomic PCR products analyzed to confirm the results. PCR products harboring suspected mutations are then cloned and sequenced to validate the results of the direct sequencing. PCR products is cloned into T-tailed vectors as described in Holton et al., Nucleic Acids Res., 19: 1156 (1991) and sequenced with T7 polymerase (United States Biochemical). Affected individuals are identified by mutations not present in unaffected individuals.

[0439] Genomic rearrangements may also be determined. Genomic clones are nick-translated with digoxigenin deoxyuridine 5′ triphosphate (Boehringer Manheim), and FISH is performed as described in Johnson et al., Methods Cell Biol. 35: 73-99 (1991). Hybridization with the labeled probe is carried out using a vast excess of human cot-1 DNA for specific hybridization to the corresponding genomic locus.

[0440] Chromosomes are counterstained with 4,6-diamino-2-phenylidole and propidium iodide, producing a combination of C-and R-bands. Aligned images for precise mapping are obtained using a triple-band filter set (Chroma Technology, Brattleboro, Vt.) in combination with a cooled charge-coupled device camera (Photometrics, Tucson, Ariz.) and variable excitation wavelength filters. Johnson (1991). Image collection, analysis and chromosomal fractional length measurements are performed using the ISee Graphical Program System. (Inovision Corporation, Durham, N.C.) Chromosome alterations of the genomic region hybridized by the probe are identified as insertions, deletions, and translocations. These alterations are used as a diagnostic marker for an associated disease.

### Example 7

### Method of Detecting Abnormal Levels of a Polypeptide in a Biological Sample

[0441] Antibody-sandwich ELISAs are used to detect polypeptides in a sample, preferably a biological sample. Wells of a microtiter plate are coated with specific antibodies, at a final concentration of 0.2 to 10 ug/ml. The antibodies are either monoclonal or polyclonal and are produced by the method described above. The wells are blocked so that non-specific binding of the polypeptide to the well is reduced. The coated wells are then incubated for >2 hours at RT with a sample containing the polypeptide. Preferably, serial dilutions of the sample should be used to validate results. The plates are then washed three times with deionized or distilled water to remove unbound polypeptide. Next, 50 μl of specific antibody-alkaline phosphatase conjugate, at a concentration of 25-400 ng, is added and incubated for 2 hours at room temperature. The plates are again washed three times with deionized or distilled water to remove unbound conjugate. 75 μl of 4-methylumbelliferyl phosphate (MUP) or p-nitrophenyl phosphate (NPP) substrate solution are added to each well and incubated 1 hour at room temperature.

[0442] The reaction is measured by a microtiter plate reader. A standard curve is prepared, using serial dilutions of a control sample, and polypeptide concentrations are plotted on the X-axis (log scale) and fluorescence or absorbance on the Y-axis (linear scale). The concentration of the polypeptide in the sample is calculated using the standard curve.

### Example 8

### Formulating a Polypeptide

[0443] The secreted polypeptide composition will be formulated and dosed in a fashion consistent with good medical practice, taking into account the clinical condition of the individual patient (especially the side effects of treatment with the secreted polypeptide alone), the site of delivery, the method of administration, the scheduling of administration, and other factors known to practitioners. The “effective amount” for purposes herein is thus determined by such considerations.

[0444] As a general proposition, the total pharmaceutically effective amount of secreted polypeptide administered parenterally per dose will be in the range of about 1 μg/kg/day to 10 mg/kg/day of patient body weight, although, as noted above, this will be subject to therapeutic discretion. More preferably, this dose is at least 0.01 mg/kg/day, and most preferably for humans between about 0.01 and 1 mg/kg/day for the hormone. If given continuously, the secreted polypeptide is typically administered at a dose rate of about 1 μg/kg/hour to about 50 mg/kg/hour, either by 14 injections per day or by continuous subcutaneous infusions, for example, using a mini-pump. An intravenous bag solution may also be employed. The length of treatment needed to observe changes and the interval following treatment for responses to occur appears to vary depending on the desired effect.

[0445] Pharmaceutical compositions containing the secreted protein of the invention are administered orally, rectally, parenterally, intracistemally, intravaginally, intraperitoneally, topically (as by powders, ointments, gels, drops or transdermal patch), bucally, or as an oral or nasal spray. “Pharmaceutically acceptable carrier” refers to a non-toxic solid, semisolid or liquid filler, diluent, encapsulating material or formulation auxiliary of any type. The term “parenteral” as used herein refers to modes of administration which include intravenous, intramuscular, intraperitoneal, intrasternal, subcutaneous and intraarticular injection and infusion.

[0446] The secreted polypeptide is also suitably administered by sustained-release systems. Suitable examples of sustained-release compositions include semipermeable polymer matrices in the form of shaped articles, e.g., films, or microcapsules. Sustained-release matrices include polylactides (U.S. Pat. No. 3,773,919, EP 58,481, the contents of which are hereby incorporated by reference herein in their entirety), copolymers of L-glutamic acid and gamma-ethyl-L-glutamate (Sidman, U. et al., Biopolymers 22: 547-556 (1983)), poly(2-hydroxyethyl methacrylate) (R. Langer et al., J. Biomed. Mater. Res. 15: 167-277 (1981), and R. Langer, Chem. Tech. 12: 98-105 (1982)), ethylene vinyl acetate (R. Langer et al.) or poly-D-(−)-3-hydroxybutyric acid (EP 133,988). Sustained-release compositions also include liposomally entrapped polypeptides. Liposomes containing the secreted polypeptide are prepared by methods known per se: DE Epstein et al., Proc. Natl. Acad. Sci. USA 82: 3688-3692 (1985); Hwang et al., Proc. Natl. Acad. Sci. USA 77: 4030-4034 (1980); EP 52,322; EP 36,676; EP 88,046; EP 143,949; EP 142,641; Japanese Pat. Appl. 83-118008; U.S. Pat. Nos. 4,485,045 and 4,544,545; and EP 102,324, the contents of which are hereby incorporated by reference herein in their entirety. Ordinarily, the liposomes are of the small (about 200-800 Angstroms) unilamellar type in which the lipid content is greater than about 30 mol. percent cholesterol, the selected proportion being adjusted for the optimal secreted polypeptide therapy.

[0447] For parenteral administration, in one embodiment, the secreted polypeptide is formulated generally by mixing it at the desired degree of purity, in a unit dosage injectable form (solution, suspension, or emulsion), with a pharmaceutically acceptable carrier, i.e., one that is non-toxic to recipients at the dosages and concentrations employed and is compatible with other ingredients of the formulation.

[0448] For example, the formulation preferably does not include oxidizing agents and other compounds that are known to be deleterious to polypeptides. Generally, the formulations are prepared by contacting the polypeptide uniformly and intimately with liquid carriers or finely divided solid carriers or both. Then, if necessary, the product is shaped into the desired formulation. Preferably, the carrier is a parenteral carrier, more preferably, a solution that is isotonic with the blood of the recipient. Examples of such carrier vehicles include water, saline, Ringer's solution, and dextrose solution. Nonaqueous vehicles such as fixed oils and ethyl oleate are also useful herein, as well as liposomes.

[0449] The carrier suitably contains minor amounts of additives such as substances that enhance isotonicity and chemical stability. Such materials are non-toxic to recipients at the dosages and concentrations employed, and include buffers such as phosphate, citrate, succinate, acetic acid, and other organic acids or their salts; antioxidants such as ascorbic acid; low molecular weight (less than about ten residues) polypeptides, e.g., polyarginine or tripeptides; proteins, such as serum albumin, gelatin, or immunoglobulins; hydrophilic polymers such as polyvinylpyrrolidone; amino acids, such as glycine, glutamic acid, aspartic acid, or arginine; monosaccharides, disaccharides, and other carbohydrates including cellulose or its derivatives, glucose, manose, or dextrins; chelating agents such as EDTA; sugar alcohols such as mannitol or sorbitol; counterions such as sodium; and/or nonionic surfactants such as polysorbates, poloxamers, or PEG.

[0450] The secreted polypeptide is typically formulated in such vehicles at a concentration of about 0.1 mg/ml to 100 mg/ml, preferably 1-10 mg/ml, at a pH of about 3 to 8. It will be understood that the use of certain of the foregoing excipients, carriers, or stabilizers will result in the formation of polypeptide salts.

[0451] Any polypeptide to be used for therapeutic administration can be sterile. Sterility is readily accomplished by filtration through sterile filtration membranes (e.g., 0.2 micron membranes). Therapeutic polypeptide compositions generally are placed into a container having a sterile access port, for example, an intravenous solution bag or vial having a stopper pierceable by a hypodermic injection needle.

[0452] Polypeptides ordinarily will be stored in unit or multi-dose containers, for example, sealed ampules or vials, as an aqueous solution or as a lyophilized formulation for reconstitution. As an example of a lyophilized formulation, 10-ml vials are filled with 5 ml of sterile-filtered 1% (w/v) aqueous polypeptide solution, and the resulting mixture is lyophilized. The infusion solution is prepared by reconstituting the lyophilized polypeptide using bacteriostatic Water-for-Injection.

[0453] The invention also provides a pharmaceutical pack or kit comprising one or more containers filled with one or more of the ingredients of the pharmaceutical compositions of the invention. Associated with such container (s) can be a notice in the form prescribed by a governmental agency regulating the manufacture, use or sale of pharmaceuticals or biological products, which notice reflects approval by the agency of manufacture, use or sale for human administration. In addition, the polypeptides of the present invention may be employed in conjunction with other therapeutic compounds.

### Example 9

### Method of Treating Decreased Levels of the Polypeptide

[0454] It will be appreciated that conditions caused by a decrease in the standard or normal expression level of a secreted protein in an individual can be treated by administering the polypeptide of the present invention, preferably in the secreted form. Thus, the invention also provides a method of treatment of an individual in need of an increased level of the polypeptide comprising administering to such an individual a pharmaceutical composition comprising an amount of the polypeptide to increase the activity level of the polypeptide in such an individual.

[0455] For example, a patient with decreased levels of a polypeptide receives a daily dose 0.1-100 ug/kg of the polypeptide for six consecutive days. Preferably, the polypeptide is in the secreted form. The exact details of the dosing scheme, based on administration and formulation, are provided above.

### Example 10

### Method of Treating Increased Levels of the Polypeptide

[0456] Antisense or RNAi technology are used to inhibit production of a polypeptide of the present invention. This technology is one example of a method of decreasing levels of a polypeptide, preferably a secreted form, due to a variety of etiologies, such as cancer.

[0457] For example, a patient diagnosed with abnormally increased levels of a polypeptide is administered intravenously antisense polynucleotides at 0.5, 1.0, 1.5, 2.0 and 3.0 mg/kg day for 21 days. This treatment is repeated after a 7-day rest period if the treatment was well tolerated. The formulation of the antisense polynucleotide is provided above.

### Example 11

### Method of Treatment Using Gene Therapy

[0458] One method of gene therapy transplants fibroblasts, which are capable of expressing a polypeptide, onto a patient. Generally, fibroblasts are obtained from a subject by skin biopsy. The resulting tissue is placed in tissue-culture medium and separated into small pieces. Small chunks of the tissue are placed on a wet surface of a tissue culture flask, approximately ten pieces are placed in each flask. The flask is turned upside down, closed tight and left at room temperature over night. After 24 hours at room temperature, the flask is inverted and the chunks of tissue remain fixed to the bottom of the flask and fresh media (e.g., Ham's F12 media, with 10% FBS, penicillin and streptomycin) is added. The flasks are then incubated at 37° C. for approximately one week.

[0459] At this time, fresh media is added and subsequently changed every several days. After an additional two weeks in culture, a monolayer of fibroblasts emerge. The monolayer is trypsinized and scaled into larger flasks. pMV-7 (Kirschmeier, P. T. et al., DNA, 7: 219-25 (1988)), flanked by the long terminal repeats of the Moloney murine sarcoma virus, is digested with EcoRI and HindIII and subsequently treated with calf intestinal phosphatase. The linear vector is fractionated on agarose gel and purified, using glass beads.

[0460] The cDNA encoding a polypeptide of the present invention can be amplified using PCR primers which correspond to the 5′ and 3′ end sequences respectively as set forth in Example 3. Preferably, the 5′ primer contains an EcoRI site and the 3′ primer includes a HindIII site. Equal quantities of the Moloney murine sarcoma virus linear backbone and the amplified EcoRI and HindIII fragment are added together, in the presence of T4 DNA ligase. The resulting mixture is maintained under conditions appropriate for ligation of the two fragments. The ligation mixture is then used to transform bacteria HB 101, which are then plated onto agar containing kanamycin for the purpose of confirming that the vector has the gene of interest properly inserted.

[0461] The amphotropic pA317 or GP+am12 packaging cells are grown in tissue culture to confluent density in Dulbecco's Modified Eagles Medium (DMEM) with 10% calf serum (CS), penicillin and streptomycin. The MSV vector containing the gene is then added to the media and the packaging cells transduced with the vector. The packaging cells now produce infectious viral particles containing the gene (the packaging cells are now referred to as producer cells).

[0462] Fresh media is added to the transduced producer cells, and subsequently, the media is harvested from a 10 cm plate of confluent producer cells. The spent media, containing the infectious viral particles, is filtered through a millipore filter to remove detached producer cells and this media is then used to infect fibroblast cells. Media is removed from a sub-confluent plate of fibroblasts and quickly replaced with the media from the producer cells. This media is removed and replaced with fresh media.

[0463] If the titer of virus is high, then virtually all fibroblasts will be infected and no selection is required. If the titer is very low, then it is necessary to use a retroviral vector that has a selectable marker, such as neo or his. Once the fibroblasts have been efficiently infected, the fibroblasts are analyzed to determine whether protein is produced.

[0464] The engineered fibroblasts are then transplanted onto the host, either alone or after having been grown to confluence on cytodex 3 microcarrier beads.

### Example 12

### Method of Treatment Using Gene Therapy-In Vivo

[0465] Another aspect of the present invention is using in vivo gene therapy methods to treat disorders, diseases and conditions. The gene therapy method relates to the introduction of naked nucleic acid (DNA, RNA, and antisense DNA or RNA) sequences into an animal to increase or decrease the expression of the polypeptide.

[0466] The polynucleotide of the present invention may be operatively linked to a promoter or any other genetic elements necessary for the expression of the polypeptide by the target tissue. Such gene therapy and delivery techniques and methods are known in the art, see, for example, Tabata H. et al. Cardiovasc. Res. 35 (3): 470-479 (1997); Chao J et al. Pharmacol. Res. 35 (6): 517-522 (1997); Wolff J. A. Neuromuscul. Disord. 7 (5): 314-318 (1997), Schwartz B. et al. Gene Ther. 3 (5): 405411 (1996); and Tsurumi Y. et al. Circulation 94 (12): 3281-3290 (1996); WO 90/11092, WO 98/11779; U.S. Pat. Nos. 5,693,622; 5,705,151; 5,580,859, the contents of which are hereby incorporated by reference herein in their entirety.

[0467] The polynucleotide constructs may be delivered by any method that delivers injectable materials to the cells of an animal, such as, injection into the interstitial space of tissues (heart, muscle, skin, endometrial, liver, intestine and the like). The polynucleotide constructs can be delivered in a pharmaceutically acceptable liquid or aqueous carrier.

[0468] The term “naked” polynucleotide, DNA or RNA, refers to sequences that are free from any delivery vehicle that acts to assist, promote, or facilitate entry into the cell, including viral sequences, viral particles, liposome formulations, lipofectin or precipitating agents and the like. However, the polynucleotides of the present invention may also be delivered in liposome formulations (such as those taught in Felgner P. L. et al. Ann. NY Acad. Sci. 772: 126-139 (1995) and Abdallah B. et al. Biol. Cell 85 (1): 1-7 (1995)) which can be prepared by methods well known to those skilled in the art.

[0469] The polynucleotide vector constructs used in the gene therapy method are preferably constructs that will not integrate into the host genome nor will they contain sequences that allow for replication. Any strong promoter known to those skilled in the art can be used for driving the expression of DNA. Unlike other gene therapies techniques, one major advantage of introducing naked nucleic acid sequences into target cells is the transitory nature of the polynucleotide synthesis in the cells. Studies have shown that nonreplicating DNA sequences can be introduced into cells to provide production of the desired polypeptide for periods of up to six months.

[0470] The polynucleotide construct can be delivered to the interstitial space of tissues within the an animal, including of muscle, skin, brain, endometrial, liver, spleen, bone marrow, thymus, heart, lymph, blood, bone, cartilage, pancreas, kidney, gall bladder, stomach, intestine, testis, ovary, uterus, rectum, nervous system, eye, gland, and connective tissue. Interstitial space of the tissues comprises the intercellular fluid, mucopolysaccharide matrix among the reticular fibers of organ tissues, elastic fibers in the walls of vessels or chambers, collagen fibers of fibrous tissues, or that same matrix within connective tissue ensheathing muscle cells or in the lacunae of bone. It is similarly the space occupied by the plasma of the circulation and the lymph fluid of the lymphatic channels. Delivery to the interstitial space of muscle tissue is preferred for the reasons discussed below. They may be conveniently delivered by injection into the tissues comprising these cells. They are preferably delivered to and expressed in persistent, non-dividing cells which are differentiated, although delivery and expression may be achieved in non-differentiated or less completely differentiated cells, such as, for example, stem cells of blood or skin fibroblasts. In vivo muscle cells are particularly competent in their ability to take up and express polynucleotides.

[0471] For the naked polynucleotide injection, an effective dosage amount of DNA or RNA will be in the range of from about 0.05 μg/kg body weight to about 50 mg/kg body weight. Preferably the dosage will be from about 0.005 mg/kg to about 20 mg/kg and more preferably from about 0.05 mg/kg to about 5 mg/kg. Of course, as the artisan of ordinary skill will appreciate, this dosage will vary according to the tissue site of injection. The appropriate and effective dosage of nucleic acid sequence can readily be determined by those of ordinary skill in the art and may depend on the condition being treated and the route of administration. The preferred route of administration is by the parenteral route of injection into the interstitial space of tissues. However, other parenteral routes may also be used, such as, inhalation of an aerosol formulation particularly for delivery to endometrials or bronchial tissues, throat or mucous membranes of the nose. In addition, naked polynucleotide constructs can be delivered to arteries during angioplasty by the catheter used in the procedure.

[0472] The dose response effects of injected polynucleotide in muscle in vivo is determined as follows. Suitable template DNA for production of mRNA coding for polypeptide of the present invention is prepared in accordance with a standard recombinant DNA methodology. The template DNA, which may be either circular or linear, is either used as naked DNA or complexed with liposomes. The quadriceps muscles of mice are then injected with various amounts of the template DNA.

[0473] Five to six week old female and male Balb/C mice are anesthetized by intraperitoneal injection with 0.3 ml of 2.5% Avertin. A 1.5 cm incision is made on the anterior thigh, and the quadriceps muscle is directly visualized. The template DNA is injected in 0.1 ml of carrier in a 1 cc syringe through a 27 gauge needle over one minute, approximately 0.5 cm from the distal insertion site of the muscle into the knee and about 0.2 cm deep. A suture is placed over the injection site for future localization, and the skin is closed with stainless steel clips.

[0474] After an appropriate incubation time (e.g., 7 days) muscle extracts are prepared by excising the entire quadriceps. Every fifth 15 um cross-section of the individual quadriceps muscles is histochemically stained for protein expression. A time course for protein expression may be done in a similar fashion except that quadriceps from different mice are harvested at different times. Persistence of DNA in muscle following injection may be determined by Southern blot analysis after preparing total cellular DNA and HIRT supernatants from injected and control mice.

[0475] The results of the above experimentation in mice can be use to extrapolate proper dosages and other treatment parameters in humans and other animals using naked DNA.

### Example 13

### Transgenic Animals

[0476] The polypeptides of the invention can also be expressed in transgenic animals. Animals of any species, including, but not limited to, mice, rats, rabbits, hamsters, guinea pigs, pigs, micro-pigs, goats, sheep, cows and non-human primates, e.g., baboons, monkeys, and chimpanzees may be used to generate transgenic animals. In a specific embodiment, techniques described herein or otherwise known in the art, are used to express polypeptides of the invention in humans, as part of a gene therapy protocol.

[0477] Any technique known in the art may be used to introduce the transgene (I. e., polynucleotides of the invention) into animals to produce the founder lines of transgenic animals. Such techniques include, but are not limited to, pronuclear microinjection (Paterson et al., Appl. Microbiol. Biotechnol. 40: 691-698 (1994); Carver et al., Biotechnology 11: 1263-1270 (1993); Wright et al., Biotechnology 9: 830-834 (1991); and U.S. Pat. No. 4,873,191, the contents of which is hereby incorporated by reference herein in its entirety); retrovirus mediated gene transfer into germ lines (Van der Putten et al., Proc. Natl. Acad. Sci., USA 82: 6148-6152 (1985)), blastocysts or embryos; gene targeting in embryonic stem cells (Thompson et al., Cell 56: 313-321 (1989)); electroporation of cells or embryos (Lo, 1983, Mol Cell. Biol. 3: 1803-1814 (1983)); introduction of the polynucleotides of the invention using a gene gun (see, e.g., Ulmer et al., Science 259: 1745 (1993); introducing nucleic acid constructs into embryonic pleuripotent stem cells and transferring the stem cells back into the blastocyst; and sperm mediated gene transfer (Lavitrano et al., Cell 57: 717-723 (1989). For a review of such techniques, see Gordon, “Transgenic Animals,” Intl. Rev. Cytol. 115: 171-229 (1989).

[0478] Any technique known in the art may be used to produce transgenic clones containing polynucleotides of the invention, for example, nuclear transfer into enucleated oocytes of nuclei from cultured embryonic, fetal, or adult cells induced to quiescence (Campell et al., Nature 380: 64-66 (1996); Wilmut et al., Nature 385: 810813 (1997)).

[0479] The present invention provides for transgenic animals that carry the transgene in all their cells, as well as animals which carry the transgene in some, but not all their cells, I. e., mosaic animals or chimeric. The transgene may be integrated as a single transgene or as multiple copies such as in concatamers, e.g., head-to-head tandems or head-to-tail tandems. The transgene may also be selectively introduced into and activated in a particular cell type by following, for example, the teaching of Lasko et al. (Lasko et al., Proc. Natl. Acad. Sci. USA 89: 6232-6236 (1992)). The regulatory sequences required for such a cell-type specific activation will depend upon the particular cell type of interest, and will be apparent to those of skill in the art. When it is desired that the polynucleotide transgene be integrated into the chromosomal site of the endogenous gene, gene targeting is preferred. Briefly, when such a technique is to be utilized, vectors containing some nucleotide sequences homologous to the endogenous gene are designed for the purpose of integrating, via homologous recombination with chromosomal sequences, into and disrupting the function of the nucleotide sequence of the endogenous gene. The transgene may also be selectively introduced into a particular cell type, thus inactivating the endogenous gene in only that cell type, by following, for example, the teaching of Gu et al. (Gu et al., Science 265: 103-106 (1994)). The regulatory sequences required for such a cell-type specific inactivation will depend upon the particular cell type of interest, and will be apparent to those of skill in the art.

[0480] Once transgenic animals have been generated, the expression of the recombinant gene may be assayed utilizing standard techniques. Initial screening may be accomplished by Southern blot analysis or PCR techniques to analyze animal tissues to verify that integration of the transgene has taken place. The level of mRNA expression of the transgene in the tissues of the transgenic animals may also be assessed using techniques which include, but are not limited to, Northern blot analysis of tissue samples obtained from the animal, in situ hybridization analysis, and reverse transcriptase-PCR (rt-PCR). Samples of transgenic gene-expressing tissue may also be evaluated immunocytochemically or immunohistochemically using antibodies specific for the transgene product.

[0481] Once the founder animals are produced, they may be bred, inbred, outbred, or crossbred to produce colonies of the particular animal. Examples of such breeding strategies include, but are not limited to: outbreeding of founder animals with more than one integration site in order to establish separate lines; inbreeding of separate lines in order to produce compound transgenics that express the transgene at higher levels because of the effects of additive expression of each transgene; crossing of heterozygous transgenic animals to produce animals homozygous for a given integration site in order to both augment expression and eliminate the need for screening of animals by DNA analysis; crossing of separate homozygous lines to produce compound heterozygous or homozygous lines; and breeding to place the transgene on a distinct background that is appropriate for an experimental model of interest.

[0482] Transgenic animals of the invention have uses which include, but are not limited to, animal model systems useful in elaborating the biological function of polypeptides of the present invention, studying conditions and/or disorders associated with aberrant expression, and in screening for compounds effective in ameliorating such conditions and/or disorders.

### Example 14

### Knock-Out Animals

[0483] Endogenous gene expression can also be reduced by inactivating or “knocking out” the gene and/or its promoter using targeted homologous recombination. (E. g., see Smithies et al., Nature 317: 230-234 (1985); Thomas & Capecchi, Cell 51: 503512 (1987); Thompson et al., Cell 5: 313-321 (1989)) Alternatively, RNAi technology may be used. For example, a mutant, non-functional polynucleotide of the invention (or a completely unrelated DNA sequence) flanked by DNA homologous to the endogenous polynucleotide sequence (either the coding regions or regulatory regions of the gene) can be used, with or without a selectable marker and/or a negative selectable marker, to transfect cells that express polypeptides of the invention in vivo. In another embodiment, techniques known in the art are used to generate knockouts in cells that contain, but do not express the gene of interest. Insertion of the DNA construct, via targeted homologous recombination, results in inactivation of the targeted gene. Such approaches are particularly suited in research and agricultural fields where modifications to embryonic stem cells can be used to generate animal offspring with an inactive targeted gene (e.g., see Thomas & Capecchi 1987 and Thompson 1989, supra). However, this approach can be routinely adapted for use in humans provided the recombinant DNA constructs are directly administered or targeted to the required site in vivo using appropriate viral vectors that will be apparent to those of skill in the art.

[0484] In further embodiments of the invention, cells that are genetically engineered to express the polypeptides of the invention, or alternatively, that are genetically engineered not to express the polypeptides of the invention (e.g., knockouts) are administered to a patient in vivo. Such cells may be obtained from the patient (i.e., animal, including human) or an MHC compatible donor and can include, but are not limited to fibroblasts, bone marrow cells, blood cells (e.g., lymphocytes), adipocytes, muscle cells, endothelial cells etc. The cells are genetically engineered in vitro using recombinant DNA techniques to introduce the coding sequence of polypeptides of the invention into the cells, or alternatively, to disrupt the coding sequence and/or endogenous regulatory sequence associated with the polypeptides of the invention, e.g., by transduction (using viral vectors, and preferably vectors that integrate the transgene into the cell genome) or transfection procedures, including, but not limited to, the use of plasmids, cosmids, YACs, naked DNA, electroporation, liposomes, etc.

[0485] The coding sequence of the polypeptides of the invention can be placed under the control of a strong constitutive or inducible promoter or promoter/enhancer to achieve expression, and preferably secretion, of the polypeptides of the invention. The engineered cells which express and preferably secrete the polypeptides of the invention can be introduced into the patient systemically, e.g., in the circulation, or intraperitoneally.

[0486] Alternatively, the cells can be incorporated into a matrix and implanted in the body, e.g., genetically engineered fibroblasts can be implanted as part of a skin graft; genetically engineered endothelial cells can be implanted as part of a lymphatic or vascular graft. (See, for example, Anderson et al. U.S. Pat. No. 5,399,349; and Mulligan & Wilson, U.S. Pat. No. 5,460,959, the contents of which are hereby incorporated by reference herein in their entirety).

[0487] When the cells to be administered are non-autologous or non-MHC compatible cells, they can be administered using well known techniques which prevent the development of a host immune response against the introduced cells. For example, the cells may be introduced in an encapsulated form which, while allowing for an exchange of components with the immediate extracellular environment, does not allow the introduced cells to be recognized by the host immune system.

[0488] Transgenic and “knock-out” animals of the invention have uses which include, but are not limited to, animal model systems useful in elaborating the biological function of polypeptides of the present invention, studying conditions and/or disorders associated with aberrant expression, and in screening for compounds effective in ameliorating such conditions and/or disorders.

[0489] While preferred illustrative embodiments of the present invention are described, one skilled in the art will appreciate that the present invention can be practiced by other than the described embodiments, which are presented for purposes of illustration only and not by way of limitation. The present invention is limited only by the claims that follow.

The application's sequence listing, which the Patent Office published only in electronic form, follows.

SEQUENCE LISTING (666 sequences)

SEQ ID NO: 1 - DNA, 798 bp, Homo sapien
actccccccgtgcgcccgctcgactcacagaatgatccattagttgtttttacaaggatattataatagatccctgatatacttatacatctctatgtaacgtttgttttgtatatgtatatataaatgcaaacccacacatagagtgaatagaatagattctgggccccttatgactcagtttcaaaggatgtcatgttcagaagtcagtattcctcaaagaacttataggaaacatttgtgttttatatagcacaagttgaaattagttttcccttcatattctttctgtcttccattcttatattccgtagataccccaaagcctctgtctctatttcttcctctcctcctttcaccaaaaccctccctgatgtctctaccactgctgggccttatctatctcccttcccattttctttctgttttcttctgcctagtgaatagttctgggccttttgcatataaatctctcatctcagcttccttggttcttctcatagaacacacctccctcccatttgttttatctacacaataagacaatggaaggtgggggtgtagccagtgggaagtggtcaggatgccaatattggaatctttttctttgttagtaggcaggaggaaggaagctacaaatacccccacagtaataagtttttcccctgtttcacatgaagaatttctgaaggattctgtaagaaactgaacagcaggctatctggcgggataggcctgtggggtcagaggtaggagaattagattttgccttcattgtctgaactgtttttgttttaa

SEQ ID NO: 2 - DNA, 1167 bp, Homo sapien
gttttttttttgtttttttttttttgttttttttttgtttgagatggagtctcgctgttgttgcccaggctggagtgcaatggtgtgatctcggctcaccacaaactccgtctcctgggttcaagtgattctcctgcctcaacctcccaagtagctgggattactggcatgcatcactacgccaagctaattttgtatttttagtagagacagggtttctccatgttggtcaggctggtcttgaactcccaacctcaggtgatccacccgcctcagcctcccaaagtgctgggattacagacataagccacctcgcccagccaattatctctattttttaatgactttctaatagtaatatatatagttttaaaacaaaaacagttcagacaatgaaggcaaaatctaattctcctacctctgaccccacaggcctatcccgccagatagcctgctgttcagtttcttacagaatccttcagaaattcttcatgtgaaacaggggaaaaacttattactgtgggggtatttgtagcttccttcctcctgcctactaacaaagaaaaagattccaatattggcatcctgaccacttcccactggctacacccccaccttccattgtcttattgtgtagataaaacaaatgggagggaggtgtgttctatgagaagaaccaaggaagctgagatgagagatttatatgcaaaaggcccagaactattcactaggcagaagaaaacagaaagaaaatgggaagggagatagataaggcccagcagtggtagagacatcagggagggttttggtgaaaggaggagaggaagaaatagagacagaggctttggggtatctacggaatataagaatggaagacagaaagaatatgaagggaaaactaatttcaacttgtgctatataaaacacaaatgtttcctataagttctttgaggaatactgacttctgaacatgacatcctttgaaactgagtcataaggggcccagaatctattctattcactctatgtgtgggtttgcatttatatatacatatacaaaacaaacgttacatagagatgtataagtatatcagggatctattataatatccttgtaaaaacaactaatggatcattctgtgagtcgagcgggcgcacggggggagt

SEQ ID NO: 3 - DNA, 2567 bp, Homo sapien
tcacaggatgatccattagtgtgttttttaaaaggatatgtatagatagatccactgatatactatacatctctatgtacgtgtgtgtgtgtatatgtatatataaatgcaaacccacacatagagtgaatagaatagattctgggccccttatgactcagtttcaaaggatgtcatgttcagaagtcagtattcctcaaagaacttataggaaacatttgtgttttatatagcacaagttgaaattagttttcccttcatattctttctgtcttccattcttatattccgtagataccccaaagcctctgtctctatttcttcctctcctcctttcaccaaaaccctccctgatgtctctaccactgctgggccttatctatctcccttcccattttctttctgttttcttctgcctagtgaatagttctgggccttttgcatataaatctctcatctcagcttccttggttcttctcatagaacacacctccctcccatttgttttatctacacaataagacaatggaaggtgggggtgtagccagtgggaagtggtcaggatgccaatattggaatctttttctttgttagtaggcaggaggaaggaagctacaaatacccccacagtaataagttttttccctgtttcacatgaagaatttctgaaggattctgtaagaaactgaacagcaggctatctggcgggataggcctgtggggtcagaggtaggagaattagattttgccttcattgtctgaactgtttttgttttaaaactatatatattactattagaaagtcattaaaaaatagagataattggctgggcgaggtggcttatgtctgtaatcccagcactttgggaggctgaggcgggtggatcacctgaggttgggagttcaagaccagcctgaccaacatggagaaaccctgtctctactaaaaatacaaaattagcttggcgtagtgatgcatgccagtaatcccagctacttgggaggttgaggcaggagaatcacttgaacccaggagacggagtttgtggtgagccgagatcacaccattgcactccagcctgggcaacaacagtgagactccatctaaaaaaaaaacaaacaaacaaaaagataattaatagatgcactttttattttaaaattttgtgggtacattgtaggtgtatacatttatggggtacatgagatatttttgatacatgcatgcaatgcatattaatcacatcggggtaaatgggatatccgtcccctcaagcatttatcctttgtgttacaaacaattcagttgtttattttaaaatgtacactaaatgattgttgactgtagtcacccttttatgctattaaatactagatcttattcattctaactacacttttacattttgaaacatagtgaaaatgtcatacttgatattagagtgaattattcagtgtacacattatatgtattttaatatgtttctctttaggctgccttctagtaccaaatgttataatcagataattgacctggtgtttgtggtgatctgatattatcaggaaaagcattactctgcctttttaaactcttaaattgatacaactgctggaagaagggaggacagatccaagagatctaatttgtatataatgggagttccagagtgaaatacaagagaaaagccagatttaatagaagtaaatttcctgagctgaataaagccttatatttgcaggttgaaagtgttcactaaattctaggcaggattgatgagaaaaggcatacacctaaacatactctgacagaattcctgaatctcaaagttaaagagaaaaatatataagattccagacagaaagaagttatttgcaatgggaaaagaattggactggtatcagacagtggaatcatatctatacctgttaagagaaaaggaaagtaaccaagaagtctctttccagccaagcatcattcacctgccagagtgaaagggatgcagaaaggattccaagaatctatcatctgcatatccccatctgaagaaactgaaaagaggactgtaactaaataacaaattaatgagaatagagacttcaagaaatgagaaggtaaagtagaaagggaagatgatgagtgaacaataagccttgtaatatacatgggtatgtatcttaatgtacttggatgatgatgaaatgactgaaaatgtgtactatatgtgttaaataaagactcttaagataaatgagactcatctaactagagcctgggagtaaaagttacaatttttctcagcaaaacctaagaggtggtattggaggaaagggaggaagaagtaaaaacattctaaaagttttatcttattgggtggagggaaagcatcaaggaatagagtaacttggtggggaaatagtatattcttacataatagtaataaaatatgtgtttgatgatgtgtattaaaaaaacataaccactagtggagtgggaaagcatagtgtcattttgaaattataagaggaaacaaaggaataaattgtaacttgatcataccagtatatat

SEQ ID NO: 4 - DNA, 843 bp, Homo sapien
  misc_feature (612)..(612): n=a, c, g or t
  misc_feature (822)..(822): n=a, c, g or t
  misc_feature (834)..(834): n=a, c, g or t
  misc_feature (840)..(840): n=a, c, g or t
gcaccctggacacacaccattgctccaagtatgtcgctctctgccagcccagctgctgaagctgcctgctgtaacctgaaaccagttttatgtaatagttcctggaatacctgctgtgactcctaaaactccttttatcccaccaccttacccaccatcgtcactcaacaatcagagcttgcccagcttctccaaacttttctagtgccaatgaactatggcactagaaattatgtttcagctttttataaaactatgtttcagctttttataaaacctccaaccttctatattcttcagatctaccaagaccacccagtctgcatgtgtgcccaaattgcagctcttttctcctgaataaaacagtaaattcagagattagtctctacatttttattttgacattgacactgctttttgagcactgctgtgtgcaaggtgctgttccagtcaccaggggattcagggagacatcagcctgcagtcttccaggccatgtagaagtggtgttgcaagtgaatgctctgggggaagctccatttgtctgctctgagcccaaggagctgccacccagttggaggccatggggtgagggcaaggggaaggcttccnggaggtgggagcacccaagaggggcaagagaaggtgagtagtgatgctggaacaggtagaaacgccagacagaaggacatcctgtgtaaaggccagtgaggggtgggaagggagcacaggtgttcacaaggctgcctgggaaactgcatgtagttctagggactgccaagtacatggaatgggaagaggaagaggtccagagataggcgntgagctggtganggatangaa

SEQ ID NO: 5 - DNA, 842 bp, Homo sapien
gcaccctggacacacaccattgctccaagtatgtcgctctctgccagcccagctgctgaagctgcctgctgtaacctgaaaccagttttatgtaatagttcctggaatacctgctgtgactcctaaaactccttttatcccaccaccttacccaccatcgtcactcaacaatcagagcttgcccagcttctccaaacttttctagtgccaatgaactatggcactagaaattatgtttcagctttttataaaactatgtttcagctttttataaaacctccaaccttctatattcttcagatctaccaagaccacccagtctgcatgtgtgcccaaattgcagctcttttctcctgaataaaacagtaaattcagagattagtctctacatttttattttgacattgacactgctttttgagcactgctgtgtgcaaggtgctgttccagtcaccagggattcagggagacatcagcctgcagtcttccaggccatgtagaagtggtgttgcaagtgaatgctctgggggaagctccatttgtctgctctgagcccaaggaggctgccacccagttggaggccatggggtgagggcaaggggaaggcttccaggaggtgggagcacccaagaggggcaagagaaggtgagtagtgatgctggaacaggtagaaacgccagacagaaggacatcctgtgtaaaggcagtgaggggtgggaagggagcacaggtgttcacaaggctgcctgggaaactgcatgtagttctagggactgccaagtacatggaatgggaagaggaagaggtccagacataggcgatgagctggtgaaggatatgaa

SEQ ID NO: 6 - DNA, 5975 bp, Homo sapien
tgtttaaccaccagtagaaataaatgctttatcacccatcgtttatcccctttctttcccggctcttgaatgaaaccattcccaggcttattattgggaaccaaatcagcaaaggaatttggactaggttgattttggaattcttcttggggatattaaatccatgttcatgggtatgttaaacttgaaagtgaaaatccaaatcacaacccaaaagttgtttaagggccccttgtattaacccagattggcctttaaatcttttttatgaaatcgggtagatcccttctaagccatttggctaaagctgttaaaatgtaatgaaccaggttcatttttgttacatcaaaaaatgcaacgagatttttggcacggttcagacttaatttgcagccccctcaaaaggacatgtcaaacagtggctgctatctgattaatatagtaatgcttaaaaaaaaaaaaaggtaggggaagaaaggggggagacctaaagaaaagaacagtcaaactaaaatttgacagtttcttcctgaccccaaaaaaataaatcagatctgttcgactgtgggttctaatcagaaagtgaaaattcaacatgcagcattttagccccacaatgagaaaaatgtgatgccttctcttttttttttttcctctgcttttgttttccttgtttacttttgatcaaatcatggtaaaacccattcactgtcctggtcctagacttagatattatctggccagttatgagctgtactcactagtgccaagagagaaaataaacagtttgaaagcaccgtgtgaagtaatatgaaacagcctgaaattgtatctggcagcccgctttccacaaagaatatccatacacctttaactagtcacacttacttaaggggtcacaccccaccctccgctactggcatttctgaatctcagagtagtcttgattcaaggagaacgtgtgttattcttttacacgagactgatcatttcttggctagtgtaattcagtcttttgaataaatggaaaaaataaattgtatgttatttttatacagaaaaaaaggccttaatatcataaggtttttttatagccctcaaaactgatttttaaatggaggtaggcaactgagaaaataagcatttaaattagttttcaccccaaagccccccaaaattttgcttacaaaattagggtactcctcattctcaaagaattgggggtgaatatacagaaaaagactataatcaagagtgaaatgccaaattttacactcagttataaactaatcgaaggagcattttcacagcagactcccttatagctgtaaaaacagaatgagggaaagatctatatggagtgacatggaatcgtgtttgatatatgattaatcttcttttctaataagagaaattacaaaagagtatatctatgccatgatcctgttttcaagaagataaacagcatgtgcttagaataaaatatatccactaaactattcaaggtggttatgggaaacaaatgatagggaactttcactttctataatgtctgaactcaacaatgctacagtattacttttgcaatctagattttaaaaaatatgtccttttttaacacattcgccagattattaaaaaccttgggtgttctctatctgaaaagtgaaaggtaaaattgagcttctgagatgaaaactcttatgtgctagaagggtttcacttaaatgacagtaggaggttttacataggatacgggagagccagaggacaggaagcatgtgtggtgtgcgcgtgcatgagtatgtctgcctgtgtgtgcaagcacaagccttcagaggaaagagggagggttactgaaaaaaagagtagctaaaaggaagaagcagagagtagggtgaggtgactcagactggaggcaaggcttttgtaaacagccacaataagtacctccgatggtcccttggtaactgctagagagaacctaggaaaaagaggtgtataaaattccatccttttcagtggtggtgagaggtgccaggtgctattctgcagagaagtgtcaaccaaaaacctgtaaaaaagagccaagtaggccacaagtggtggctcatgcctgtaaccccaacactttgggatgccaaggcaggaataccacttaagaccaggagtttgagaccagcccgggcaacacagggagatcccatctctaaaaaaataaaataaaaaattagcagggtgtggtggcacacgtcctgctggcactccagaggccgaggtgggaggattgcttgaccctgggaagtcaaggctgcagtgagccatgacagtgccactgtcatccagcctgggcaacagagcaagaccgtgtcttgaaaaaaaaaggcaaaattgtctagggatgaaccgtggaagctgaagccactctgtagaaaaccatgcatgtccctggccgggtgcagtggctcatgcctgtaatcccagcactttgggaggccgaggagacttcctgtgatcagagtgaaggttctggttcttcagaagaggatgaatggagaagtgacagaaaaagtgagagttacagcgaaagttcaagtgactcttcatctagatattccgattggacagctgatgcgggcatcaatttgcagcctcctttaagaacatcatgtcgtcgacgaattactcgattttgtagtagttcagaagatgaaatatctactgagaatttatctcctccaaaaagaagacgaaagagaaagaaagaaaataagcctaagaaggaggtaatatattttcgacagggtcatgaagcttatattgaggctgtaagaagaaataatatttatgaactgaaccctaataaggagccatggagaaaaatggatcttaggctcaagaaagaattccacattttagcaagtggcaaagatgttggtttgttaacagttattcagattgctgttgatccacctgaagaattaggagctagtatttctgtcacaacagatgagctagagaaattgctctataaaccacaagctggtgaatggggtcagaaatcaagagatgaagaatgtgatagaattatcagtggtatagatcaacttttgaatcttgatatagcagcagcttttgcaggccctgttgatttgtgtacatacccgaagtactgtactgtagtagcttatccaaccgatctttacacaattcgaatgagacttgttaatcgattttacaggaatcaacactgtacaaatatctcagaactttctaacacatctgaaaatgatgagcaaaatgctgaggatttggtccatgatgggaaaaaaagcatcagagctacgaactatgttgaaagcaactggaagaaacagtgtaaggaactagtgaacttaatttttcagtgtgaagattctgaaccatttagacaacctgttgatttggttgaatatccagactacagagatattatagataccccaatggattttggaacagtaagggaaactctagatgcgggaaattatgacagccctttggagttttgcaaagacatccggctgatatttagcaatgcaaaagcgtatacaccaaacaaaagatcaaagatttatagtatgaccttgagattatctgccttatttgaagaaaaaatgaagaaaatctcttctgattttaaaattggtcaaaaattcaatgaaaaacttcgaagaagccagaggttcaagcaacggcaaaattgtaaagaaagtgaagtggaagattctttagctacctctttgtcatcgtcagcttccagtagttctgaggaaagcaaagagagttccagagctcgtgaatcctcctcacgcagtgggctatccagaagcagcaatctcagggtaaccagaactagagctgctcaaagaaaaactggtcccgtttcattagcaaatggatgtggcagaaaagccactcgaaagagagtctatttaagtgattctgataacaattcattggagactggtgaaattctaaaagccagagctggaaataaccgaaaagtcttaaggaagtgtgctgctgtggctgccaataaaataaagctaatgagtgatgtagaagagaattctagctctgaaagtgtctgttctggtcggaagctgcctcaccgcaatgcttctgctgtagctagaaaaaagttattacataattctgaagatgaacagagcttaaagtcagaaattgaagaagaggagctaaaagatgaaaatcaactattaccagtgtccagttctcacactgcccagagcaatgttgatgaatctgaaaacagagactcagagtcagaaagtgatttgcgggtagcccggaaaaattggcatgctaatggttacaagtcccatactccagcaccttcaaagacaaaatttcttaaaatagagtcttctgaggaagactctaaaagtcatgattcagatcatgcatgtaacagaactgctggcccatcaacgtctgtgcagaaacttaaggcagagagcatctcagaggaagcagattctgaaccaggaagatctggtggtaggaaatacaatacatttcacaagaatgcgagtttctttaaaaaaaccaagattctgagtgactcagaagactctgaatctgaagagcaagatagagaagatgggaaatgtcataaaatggaaatgaacccaatttcaggaaatctgaactgtgaccctattgctatgtcccagtgttcctcagatcatggatgtgaaactgatttagattcagatgatgacaaaatagaaaaaccaaacaattttatgaaagattctgcatcacaagacaatggactaagcagaaaaatttccaggaaaagggtctgttccagtgactcagacagtagtttacaggtggttaagaaatcatcaaaagccagaacaggtctcctgaggattactcgaagatgtgcagctacggctgccaataagatcaagctcatgagtgatgtagaagatgtcagtttagaaaatgtgcacactagaagcaaaaatggaaggaaaaaacctctccatcttgcttgtactacagctaagaagaaattgagtgattgtgaaggaagtgtacattgtgaagtaccaagtgaacagtatgcctgtgaaggcaagccacctgatcctgactccgaaggtagtacaaaagtgcttagtcaggctctaaatggagactcagactctgaagatatgttgaattcagaacacaagcacaggcataccaatattcacaaaatagatgcaccttctaaaagaaaaagttcctctgttacatcttcaggagaagattcaaaaagtcatattccagggagtgagactgataggacattttcttcagagtcaaccttggcacaaaaagctactgcagagaataattttgaagtggaactgaattatgggctgcgcaggtggaatggcagaagactcaggacctatggaaaggctccttttagtaagacaaaagtgattcatgattcacaggaaacagcagagaaggaagtaaaaaggaagagatcgcatcctgaattggaaaatgtgaaaatctctgaaacaactgggaattcaaagtttagacctgatactagttccaaatcatcagatttgggatctgtaactgaatcagatattgactgtactgataatacaaaaaccaaaaggaggaaaacgaaaggaaaagcaaaagtagttagaaaaggtaaaacttttacagctaacatatctaaaactgtgagacgtcaaagacaaagcaaacgccctaggttaagtgtggatgataatgactgggaggatttggactatgcaaaatctaaaagagttcttcgacgttcaaaaataaaaacgagaaatcagggtagaaggactgtgagataccatgatggggatgatgacagaagtttagaaaatgtgttagatttcaatggttgcaccttatga

SEQ ID NO: 7 - DNA, 4078 bp, Homo sapien
tggtaaaggaattcccgggatgaagtaatagcactgtaaaaagacagaaaacaggtttaagtccctgcttctcgtgtacttgctgtgtaaccttgagccagactttgtgcttctagcatctaaaatggaggtaacagtggggttatcttggtaacacaatcctttataaactgtaaaacattgcccagatgctattaagtatctttgagttagaatttggaataaggtgcagtaggcctgtcccagccccctctcatttgggattggttcctccttagttgtctcgtctgtcctctttcctatatttttggtttctcttttgcctttccccataggcactcttcactgtcctttgccttttctcctgagtctgtttttctttctccctcctaaccagcttctggctcctcaagctgctgttcctgttaggtctctgtgctattgccttctgcattcctgatgagcatctcttcccaggtactctccctcccacactcttggcaggagtaggctaagttttctaagataacaagtgggtaagaagaggagtaatggccgggtgcagtggctcacgcctgtaatcccagcactttgggaggctgaggagacttcctgtgatcagagtgaaggttctggttcttcagaagaggatgaatggagaagtgacagaaaaagtgagagttacagcgaaagttcaagtgactcttcatctagatattccgattggacagctgatgcgggcatcaatttgcagcctcctttaagaacatcatgtcgtcgacgaattactcgattttgtagtagttcagaagatgaaatatctactgagaatttatctcctccaaaaagaagacgaaagagaaagaaagaaaataagcctaagaaggaggtaatatattttcgacagggtcatgaagcttatattgaggctgtaagaagaaataatatttatgaactgaaccctaataaggagccatggagaaaaatggatcttaggctcaagaaagaattccacattttagcaagtggcaaagatgttggtttgttaacagttattcagattgctgttgatccacctgaagaattaggagctagtatttctgtcacaacagatgagctagagaaattgctctataaaccacaagctggtgaatggggtcagaaatcaagagatgaagaatgtgatagaattatcagtggtatagatcaacttttgaatcttgatatagcagcagcttttgcaggccctgttgatttgtgtacatacccgaagtactgtactgtagtagcttatccaaccgatctttacacaattcgaatgagacttgttaatcgattttacaggaatcaacactgtacaaatatctcagaactttctaacacatctgaaaatgatgagcaaaatgctgaggatttggtccatgatgggaaaaaaagcatcagagctacgaactatgttgaaagcaactggaagaaacagtgtaaggaactagtgaacttaatttttcagtgtgaagattctgaaccatttagacaacctgttgatttggttgaatatccagactacagagatattatagataccccaatggattttggaacagtaagggaaactctagatgcgggaaattatgacagccctttggagttttgcaaagacatccggctgatatttagcaatgcaaaagcgtatacaccaaacaaaagatcaaagatttatagtatgaccttgagattatctgccttatttgaagaaaaaatgaagaaaatctcttctgattttaaaattggtcaaaaattcaatgaaaaacttcgaagaagccagaggttcaagcaacggcaaaattgtaaagaaagtgaagtggaagattctttagctacctctttgtcatcgtcagcttccagtagttctgaggaaagcaaagagagttccagagctcgtgaatcctcctcacgcagtgggctatccagaagcagcaatctcagggtaaccagaactagagctgctcaaagaaaaactggtcccgtttcattagcaaatggatgtggcagaaaagccactcgaaagagagtctatttaagtgattctgataacaattcattggagactggtgaaattctaaaagccagagctggaaataaccgaaaagtcttaaggaagtgtgctgctgtggctgccaataaaataaagctaatgagtgatgtagaagagaattctagctctgaaagtgtctgttctggtcggaagctgcctcaccgcaatgcttctgctgtagctagaaaaaagttattacataattctgaagatgaacagagcttaaagtcagaaattgaagaagaggagctaaaagatgaaaatcaactattaccagtgtccagttctcacactgcccagagcaatgttgatgaatctgaaaacagagactcagagtcagaaagtgatttgcgggtagcccggaaaaattggcatgctaatggttacaagtcccatactccagcaccttcaaagacaaaatttcttaaaatagagtcttctgaggaagactctaaaagtcatgattcagatcatgcatgtaacagaactgctggcccatcaacgtctgtgcagaaacttaaggcagagagcatctcagaggaagcagattctgaaccaggaagatctggtggtaggaaatacaatacatttcacaagaatgcgagtttctttaaaaaaaccaagattctgagtgactcagaagactctgaatctgaagagcaagatagagaagatgggaaatgtcataaaatggaaatgaacccaatttcaggaaatctgaactgtgaccctattgctatgtcccagtgttcctcagatcatggatgtgaaactgatttagattcagatgatgacaaaatagaaaaaccaaacaattttatgaaagattctgcatcacaagacaatggactaagcagaaaaatttccaggaaaagggtctgttccagtgactcagacagtagtttacaggtggttaagaaatcatcaaaagccagaacaggtctcctgaggattactcgaagatgtgcagctacggctgccaataagatcaagctcatgagtgatgtagaagatgtcagtttagaaaatgtgcacactagaagcaaaaatggaaggaaaaaacctctccatcttgcttgtactacagctaagaagaaattgagtgattgtgaaggaagtgtacattgtgaagtaccaagtgaacagtatgcctgtgaaggcaagccacctgatcctgactccgaaggtagtacaaaagtgcttagtcaggctctaaatggagactcagactctgaagatatgttgaattcagaacacaagcacaggcataccaatattcacaaaatagatgcaccttctaaaagaaaaagttcctctgttacatcttcaggagaagattcaaaaagtcatattccagggagtgagactgataggacattttcttcagagtcaaccttggcacaaaaagctactgcagagaataattttgaagtggaactgaattatgggctgcgcaggtggaatggcagaagactcaggacctatggaaaggctccttttagtaagacaaaagtgattcatgattcacaggaaacagcagagaaggaagtaaaaaggaagagatcgcatcctgaattggaaaatgtgaaaatctctgaaacaactgggaattcaaagtttagacctgatactagttccaaatcatcagatttgggatctgtaactgaatcagatattgactgtactgataatacaaaaaccaaaaggaggaaaacgaaaggaaaagcaaaagtagttagaaaaggtaaaacttttacagctaacatatctaaaactgtgagacgtcaaagacaaagcaaacgccctaggttaagtgtggatgataatgactgggaggatttggactatgcaaaatctaaaagagttcttcgacgttcaaaaataaaaacgagaaatcagggtagaaggactgtgagataccatgatggggatgatgacagaagtttagaaaatgtgttagatttcaatggttgcaccttatga

SEQ ID NO: 8 - DNA, 1177 bp, Homo sapien
gtagatttacaatgcttttttaagtgatatattcctgtgtaaaggaactaaatatatatgctgtgtgaaaactaatcattagatggacatggcaaaaatagtcattctgaatggtgaaagtttcttttatttttcattcagacagtgcatgctgcccctttctaatctaagaaactttgttctcttccccttggtagaatttgcggaggatgactccagcagagcttgcaaatatggagcatttatatgaatttcaccctccagtttggattactgacaccacacttagaaaatctccttttgttcctcaaatgggtgatgaggtaatatattttcgacagggtcatgaagcttatattgaggctgtaagaagaaataatatttatgaactgaaccctaataaggagccatggagaaaaatggatcttagggtaggatgatggcattattaaatcattaaacattttagcacatacatagttaaattacttacaaatctatttaaaaacctgttggaaacatattttattactttctttcctacttgataacatttctgctgtaaccaaaccttaagatcctgtgggaatggcttgtttgtcagtgggcaaaatttgtatgttgctgattggtgtgtaaaatgttaaatgcaacaacctagagtttcagaaaggcagcttggcaatatatatattatcactcttaaaaatgtttatgtatccaagacagattttcagaggaagaaatgcaagttttcaaaagaagaaataaaaactggaagaagggtttaacctcatggataataaaataaggaaataataatttttccttttcaatacttagccaattttgtgatttcgtttgtttttagctcaagaaagaattccacattttagcaagtggcaaagatgttggtttgttaacagttattcagattgctggtggggtgtgtgaagtggtccaggctttctaggggatattttgttaatagtagttgaaactgaaaaatatttggaacttttaattctgtgattttactcttctggtaatttggaaaacaagcagaaatgcttgtaaatatatgagtattgtagttcactcactgttgacagaaacaaagctggaaaaaaaaaattcagatattccacaatagtgaatgaaccaaatcatggtgcat

SEQ ID NO: 9 - DNA, 607 bp, Homo sapien
ctcccaaagtgctgggattacaggtgtaatcccagcttgctgggccagcttttagggttgatgatatttaacatattttctttattgagattcaacaattttaaaaggtacctatatgcagtatgaaaagggagggtagttttgttggttttctgtatgtgattaagtaatttgttaagatttttgtcctcttcagttcaatataattgcttcggtgtccaatgtattgcctatgactatgatcaagttgagagcattagaaggttattcattataactttgcacttatggtttaattattatttcacagttgtttaattcacatgctgcattttttcacttggtttctatcttctcattttctaagccctaaattgtctactttattttgaaggaggctgtctgcgttagtttgggaagtcagatatatagaacataatgccagaacatttaacgaacctgagagtgtaattgcaagatcagctaaaaagataactgaccaacttttaaaatttatcaagtaagtaatttcatagatgttgtgtaaaagtgactgcatattgtgctattaacaatcatctagtttgccgggcgtggtggctcatgc

SEQ ID NO: 10 - DNA, 446 bp, Homo sapien
cctatccctatatattctctatagcactgatttagtattttatttcagtgttctaggtgactatagaacataactgctgtgaataatgaaaactatgcttagcactttgtttggtacattataataataacatttgttcagtgaataagtggatgaatgatctgttgtattcctagtatcagagaagcagacactggggggaaggttgactatggcaaatccatttgatggatactccatccaggtagggactttcacttgtttaccgtcctgtccctactgcctagaagaggtcatagcatatggtagattctcaacaaatattacttactgaatgtattaggcagaaacttaatatcaagattttgaagaacacttatgaataagtagaatgcttacacattttcactgtataatataaagctatataaataaaaatgtgcatt

SEQ ID NO: 11 - DNA, 539 bp, Homo sapien
atgcggcttagccagaaattgatctgcttgttttggcagtttgtttttacaaatcagcatattcaaagcctgctaaatattagacagctacatgtatatacgtacatacatgaaattctctgtatgactgatttatatgagggagacatttttaagttacctgttgagcattttatgtgcctgtgtgtttaaactggtaaaagtatggcaattgtaaaaactttttcactacttgaatttattgaaatattctataacaaattgaaatatttgataaatagaaatataaaaatagtaataaaataaaatgacattattaatattcaatattaaccaaatattacaatatttgattactccaatttcagtaaccttgggctgggtgtggtggctctgaactcctaacactttgggaggctgagacaggaggattgcttgagcccaggaattcaagtccagcctgggcaatgtagtgagacactctcttaaaaaaaaaaatcccaagatggttgaaatagagatcaaacatcattaggttt

SEQ ID NO: 12 - DNA, 340 bp, Homo sapien
gttccctcaattttatatgattgacttgctatcagtgcttatattctggctccattcaactgaaagcactccccttttctagtgatgactcttcatctagatattccgattggacagctgatgcgggcatcaatttgcagcctcctttaagaacatcatgtcgtcgacgaattactcgattttgtagtagttcagaagatgaaatatctactgagaatttatctcctccaaaaagaagacgaaagagaaagaaagaaaataagcctaagaaggaggtaagaaaaacgtatctttaaaaatagcatgtatcatgataccccagctttaccccatttcaaat

SEQ ID NO: 13 - DNA, 19027 bp, Homo sapien
ggtccaggcggcgcgcacggtatggcggcggcggcggcggcggcggcggcgcgcgcctgagaagaggggacgccagcccggtcaggcctcggcgcggcctacacgctccgctcgctcgctcgctcccgcctcccgccccgcgcccggccatggcggagccgtcgtccgcccgacgcccggtgcctctcatcgagtcggagctgtacttccttatcgcccggtacctatcggcgggcccgtgtcggagagcggcccaggtgctggtgcaggagctggagcagtaccagttgttgccgaagagattggactgggagggcaacgagcacaacaggagctacgaggagttggtcttgtccaataagcatgtggctcctgatcatcttttgcaaatctgccagcgcatcggtcctatgttggataaagaaattccacccagtatttcaagagtcacttctttacttggtgcaggaaggcagtctttgctacgtacagcaaaagactgcaggcacacagtttggaagggctctgcctttgctgctcttcatagaggaagacctcctgaaatgccagtgaattatggttccccaccaaatcttgtggagatacatcgaggaaaacaactcacagggtgttccacttttagtacagcatttccaggaactatgtatcagcatataaaaatgcacagaaggattctcggacatctatctgctgtttactgtgtagcatttgataggacaggacatagaatctttacaggttcagatgactgtttggtaaagatttggtcaacacataatggccgcttgttatctacattaagaggtcattctgcagaaatttcagatatggcagtaaactatgagaatacaatgattgctgcggggagctgtgataaaattattagagtgtggtgcttgagaacttgtgccccagttgctgtgctccaaggacacacaggatcaattacatctttacagtttagcccgatggccaaaggctctcaaagatacatggtttccactggtgctgatgggacagtttgcttttggcaatgggatttagaatccttaaaatttagcccacgtcccctgaagttcactgaaaagcctaggccaggcgttcaaatgctttgttcttcttttagtgttggtggtatgtttttagccacaggtagtactgatcatgtaatcagaatgtattttttgggttttgaagcacccgaaaaaatcgcagaacttgaaagccacactgataaagtagatagtatccaattttgtaacaatggtgatcggttcctaagtggtagcagagatggaacagcacggatttggagatttgagcagttagaatggaggagcattttattggatatggctaccagaatctcaggggacttatcttccgaagaggaaaggtttatgaaacctaaagtaacaatgatagcttggaatcaaaatgatagcattgttgtcacagctgtgaatgatcatgtcctcaaagtgtggaattcttacactggacaactgcttcataacttaatgggacatgctgatgaagtatttgttctggagacacatccctttgattccagaattatgttatctgcaggacatgatggcagcatatttatatgggatattacaaaaggtaccaagatgaaacattattttaatatgattgaaggacaaggacatggagctgtgtttgactgtaagttttcacaggatggacagcattttgcctgtacagattctcatgggcaccttctgatatttggttttggatgcagcaaaccatatgaaaagattcctgatcagatgttcttccatactgactatcgaccacttattagagattctaataattatgtcttagatgagcaaactcagcaggctcctcatcttatgcctccaccattcttggtagatgtagatggaaatcctcatccaaccaagtatcagagattagtaccaggccgagaaaattctgcagatgaacatttgattccacagctgggctatgtggcaacaagtgatggagaggtgattgaacaaattataagcctgcaaaccaatgataatgatgaacgcagcccagaatcgagtattcttgatggaatgataagacagttgcagcagcagcaagatcagagaatgggagcagatcaggatactattccaagaggactttcaaatggtgaagaaacaccccggagaggttttagaaggctgagcttagacattcagtcccctccaaatattggtctgcgtcgtagtggacaagttgaaggtgttcgtcagatgcatcaaaacgctccacgcagtcagattgctacagaacgtgacctgcaggcttggaaacgaagagtggttgtaccagaggtaccactaggcatatttaggaagctggaagacttccgattagagaaaggtgaagaggaaagaaatctttatataataggaagaaaaagaaagactcttcagctctcacataagtcggattcagtggttttggtatcacagtctagacaaaggacatgtaggcgtaaatatccaaattatggtagaagaaatcgtagctggcgtgagttatcttctggaaatgagtcttcaagctctgtaagacatgagacttcctgtgatcagagtgaaggttctggttcttcagaagaggatgaatggagaagtgacagaaaaagtgagagttacagcgaaagttcaagtgactcttcatctagatattccgattggacagctgatgcgggcatcaatttgcagcctcctttaagaacatcatgtcgtcgacgaattactcgattttgtagtagttcagaagatgaaatatctactgagaatttatctcctccaaaaagaagacgaaagagaaagaaagaaaataagcctaagaaggagaatttgcggaggatgactccagcagagcttgcaaatatggagcatttatatgaatttcaccctccagtttggattactgacaccacacttagaaaatctccttttgttcctcaaatgggtgatgaggtaatatattttcgacagggtcatgaagcttatattgaggctgtaagaagaaataatatttatgaactgaaccctaataaggagccatggagaaaaatggatcttagggatcaagaattggttaaaatagttggaatacgatatgaagttgggccccctacactctgttgcctaaaactagcatttatagatccagcaactggaaaacttatggacaaatctttctctattagatatcatgatatgccagatgttattgactttcttgtattgcgtcaattttatgatgaagcaagacagaggaattggcagtcttgtgacagattccgctctattattgatgatgcttggtggtttggaacagtgttaagtcaagagccatatcaaccacagtatcctgatagtcatttccagtgttatattgttaggtgggataatactgaaattgaaaaacttagcccatgggacatggaaccaattcctgataatgttgatccacctgaagaattaggagctagtatttctgtcacaacagatgagctagagaaattgctctataaaccacaagctggtgaatggggtcagaaatcaagagatgaagaatgtgatagaattatcagtggtatagatcaacttttgaatcttgatatagcagcagcttttgcaggccctgttgatttgtgtacatacccgaagtactgtactgtagtagcttatccaaccgatctttacacaattcgaatgagacttgttaatcgattttacaggaggctgtctgcgttagtttgggaagtcagatatatagaacataatgccagaacatttaacgaacctgagagtgtaattgcaagatcagctaaaaagataactgaccaacttttaaaatttatcaagaatcaacactgtacaaatatctcagaactttctaacacatctgaaaatgatgagcaaaatgctgaggatttggatgatagtgatcttcctaaaacatcttctggaagaaggagagtccatgatgggaaaaaaagcatcagagctacgaactatgttgaaagcaactggaagaaacagtgtaaggaactagtgaacttaatttttcagtgtgaagattctgaaccatttagacaacctgttgatttggttgaatatccagactacagagatattatagataccccaatggattttggaacagtaagggaaactctagatgcgggaaattatgacagccctttggagttttgcaaagacatccggctgatatttagcaatgcaaaagcgtatacaccaaacaaaagatcaaagatttatagtatgaccttgagattatctgccttatttgaagaaaaaatgaagaaaatctcttctgattttaaaattggtcaaaaattcaatgaaaaacttcgaagaagccagaggttcaagcaacggcaaaattgtaaaggtgacagtcagcctaacaaaagtatcagaaacctcaagccgaagaggttaaaatctcagacaaaaataattcctgagttggtaggttctcctacccagtctacctcaagtaggacagcttatcttggaacccacaagacaagtgctggtatctcttcaggtgttacttctggtgactcttcagattcagcagaatcatcagaaaggaggaaaagaaatagacctataacaaatggttctacattatctgaaagtgaagtggaagattctttagctacctctttgtcatcgtcagcttccagtagttctgaggaaagcaaagagagttccagagctcgtgaatcctcctcacgcagtgggctatccagaagcagcaatctcagggtaaccagaactagagctgctcaaagaaaaactggtcccgtttcattagcaaatggatgtggcagaaaagccactcgaaagagagtctatttaagtgattctgataacaattcattggagactggtgaaattctaaaagccagagctggaaataaccgaaaagtcttaaggaagtgtgctgctgtggctgccaataaaataaagctaatgagtgatgtagaagagaattctagctctgaaagtgtctgttctggtcggaagctgcctcaccgcaatgcttctgctgtagctagaaaaaagttattacataattctgaagatgaacagagcttaaagtcagaaattgaagaagaggagctaaaagatgaaaatcaacyattaccagtgtccagttctcacactgcccagagcaatgttgatgaatctgaaaacagagactcagagtcagaaagtgatttgcgggtagcccggaaaaattggcatgctaatggttacaagtcccatactccagcaccttcaaagacaaaatttcttaaaatagagtcttctgaggaagactctaaaagtcatgattcagatcatgcatgtaacagaactgctggcccatcaacgtctgtgcagaaacttaaggcagagagcatctcagaggaagcagattctgaaccaggaagatctggtggtaggaaatacaatacatttcacaagaatgcgagtttctttaaaaaaaccaagattctgagtgactcagaagactctgaatctgaagagcaagatagagaagatgggaaatgtcataaaatggaaatgaacccaatttcaggaaatctgaactgtgaccctattgctatgtcccagtgttcctcagatcatggatgtgaaactgatttagattcagatgatgacaaaatagaaaaaccaaacaattttatgaaagattctgcatcacaagacaatggactaagcagaaaaatttccaggaaaagggtctgttccagtgactcagacagtagtttacaggtggttaagaaatcatcaaaagccagaacaggtctcctgaggattactcgaagatgtgcagctacggctgccaataagatcaagctcatgagtgatgtagaagatgtcagtttagaaaatgtgcacactagaagcaaaaatggaaggaaaaaacctctccatcttgcttgtactacagctaagaagaaattgagtgattgtgaaggaagtgtacattgtgaagtaccaagtgaacagtatgcctgtgaaggcaagccacctgatcctgactccgaaggtagtacaaaagtgcttagtcaggctctaaatggagactcagactctgaagatatgttgaattcagaacacaagcacaggcataccaatattcacaaaatagatgcaccttctaaaagaaaaagttcctctgttacatcttcaggagaagattcaaaaagtcatattccagggagtgagactgataggacattttcttcagagtcaaccttggcacaaaaagctactgcagagaataattttgaagtggaactgaattatgggctgcgcaggtggaatggcagaagactcaggacctatggaaaggctccttttagtaagacaaaagtgattcatgattcacaggaaacagcagagaaggaagtaaaaaggaagagatcgcatcctgaattggaaaatgtgaaaatctctgaaacaactgggaattcaaagtttagacctgatactagttccaaatcatcagatttgggatctgtaactgaatcagatattgactgtactgataatacaaaaaccaaaaggaggaaaacgaaaggaaaagcaaaagtagttagaaaaggtaaaacttttacagctaacatatctaaaactgtgagacgtcaaagacaaagcaaacgccctaggttaagtgtggatgataatgactgggaggatttggactatgcaaaatctaaaagagttcttcgacgttcaaaaataaaaacgagaaatcagggtagaaggactgtgagataccatgatggggatgatgacagaagtttagaaaatgtgttagatttcaatggttgcaccttatgaccttgagggaaagccagttcatttaagaggaaatggactggcatttatggtgaaagctggctgttaaaattatttttttgtcttacaattcagggaatatatttatatttttctatgaaaagttatgaatgtgactaaatcatgactgttatttttatttgcacttgctggtctttgtagcagcattcagcacaggtgccaaaatatgcttcattttgggggcagatctattttgacagtatttgactacatatagcaagagtttgaaatatgttaaacactagacatcctggttatcaaaaccaatgagcattactttcatggcagcaagtgtcatgcagttattttctgaatttgtcaaagaggcagtagtttctaacccctgttctatagtagttacaacaatttcacaacctatgtttacagattcttcataaatacatgcatactgacactataatcatgggaggtgtaaccatgattagtaggcgaggtacctaccactttttttttttcttcccctggctacttgagtagaatgcattataccagatctggtcactttcattgaaatggtttctaattttcttcccaagtgctgttgggtttttttcttcttaaggaaaacgttgtcacttttatgttataaacttgaatttataaagtgctggtaaattatttttaatgatttgagtgcatgttttaaacctctaggaccagagcatagtcagagcattttcttttaaattgtgcactaacaaaatgctatataatctgtcttctgtccaagatctcctggtttccattgtaagggatttaaccaaaatcttgctcttccataatcttactctgtgaaatagaggaattcgtgtgccttagatttagaagtgtgttctttaatagagtgtacagggctaaaagagtatttaagttaatatgtaggtttcccccatctgtattccaattgtagaggtgagttttgttaagagtacaattgcaaatcttatctatataggaaaatagctaaatgtcattctccatctctttgttttagtttactgcttccatgtgcaatcctaagcattctttgctggggcaactaaatgtatctttattagtgacttctagtccaaatataagaaactgtcatgttttgtgggaaaataattttataatccatttaaagtgaaagtttatcacacaaatagtacacttattttctaaccaaatacttgataggttatgctactccagtgtagatggccattcctaacttgtttgtgcctgaagatggacttgattcaaatggtttacatatttagtgggtaagggatatgttacagtaccccacctgtaagttatttattagccctaattgtgtttgatttcagacaaaattaacccttttctcctgtgtatctttgaagtggcagataaggtgaagcatcagactggtatcaatattagacaatgttatttattagccctaattgtgtttggtttcagacaaaaccttttctcctgtgtatctttgaagtggcagacaaggcgaacatcagactggtattaatgttagagaatgttctgaagtgttcctattttgtagttatctattccatttgacatagtagaaggtacattttctttctactctgatgcatggggaaggatgtttttggacattatcaactgagataggtgggaaacctcctctcatttgtggcttagagagctatcaccatttcagaactatgatgcttttcttctcagaacttgtgttaagtagatagtaaacagattgattcatgataattgtccttgactaagactgaaaagactaatgggatgccttttactttgctaattttaaaaactggtgatagatgtcaaatccattaatttatttaaactcttcttaaccttctcttttataatctgttctcaggttttaactccatgtttaccatcatttgcaaaaaggtaccaaaaaaatccataaataaatatggaatacattcataagtacatacattcttttggtataaaacaatattttgacagtttaggcttcattaatagaactattctgattatttggactgcattaattggtcattgactggccatccaattaccattttttctttcagtccaaaatagttagacccttgcatacagaagtggtattttggtttttaatcagatttggtttcatcagaagcagcaagaatggacctgatgtctttaaaagcatagccgacaatggtagcttctcaagttatgaaataaaactgagagataatggagaaaataatttttatgggtttttttggttatggtgctattcctaaggttaactttgaatatgtgacacacacactcctaagtacctttaaggaaaattaataaatcattaatagttaaaatgtttacattgagcactagaacatgtttggccttttttttctacgttatgcaaaatgcccagggatttaatgcacaggtgtactttaatgtttagggtcagtttgtagtattcttgagaaaaagataaagggttataatttgaatgtgaactgatccagaaataagtgctgtacctttccactgcacttgaagttcaacttaatggtgtatgtgaaaaacaaaaactactttggttgtgtatgtccaaagtcctatggttttattcatttatggttttacaggctttgaagtactcagatttgatttttgctttcttggaaagactcactttaccaagcatataaaggaaaaatgatttcaaacattgacaagatagatgagtgttaacaaagctttcttttttcgtgtcctccttatttaaaaaggtatacttacaatgtgaagtaacttatgaataaaaggaaaagtttatcccatattcaaataattcctaaggtcagcctccctttttgtaagtggcaaatatctgattaaatcatttctcagtttattaatccttggaaacaatgatatagcagttactcacagcttgtaaattacaacagaaaggttcctttcaaatagtagagctgcacctaaagaggaaattgggtttataagaaaatggaggcaaagaacttaagttttaagaaaaagcacttcaaaacagaagggcaaatggaaaaggggaatataaaacaaaccaataaaaataccatctgagggtgttactgtccaaaagtaaagaataagatgcatcactaagccctttgcactcgttatgacctcgtaagtaaaaattatcacttagaataaggggtgcacactacattccctctgtcttctagacttttttttttgtagaagaatcagaaaacaatttactaacctccctgtttgatattaaaaataggaagaattttaatattttctgttagtacaagttgaacttgattgtgccaactgaaaccccagaggtttgtatatcagtagaatgcaagaacattgttaaaggtgcttacgatcttttttgttttcctttccactccattgtatcaattttttgagtaacttttaaatggctagaaaatggtctttttgctttgcccttttaaagctgaaataaccagctccattcttttcatgaatagtaagttgatatatttatttatcaggtatcttgcagttgtcaccaaatactgtagttttcttatgttgtatggaaattatagttcaattattttaatgtgatggagtgcaacaagtcattgtagaacttttcacctgttaatgttgaagttatacctctgaatttctgctgtggatatcaaggaaataataaagcagaaaccccaagaaatttgcaacttaacagtttgagactgtctcttatcctagtatttgggaagagaaggaataaatttgtcaaaactaggtgagaaaatagagcattgtgggaaaaactgagtccaactagattagcaaatgttaattcctagctcaaactgtgaatagtaaggattgtaaagtatgtaatgctaagggctgtgttgtcttttcttacgattttaagttttaaaggctgttaaattacagagatgttgcccaaggatacatggggattctcaaaagtaagagatttttacctttttcataatctgccaagctggttcctaatatattgttaaattggtagaaaaatatctttaaattggtgtctgctcaagaattgcttttctagatttgatggagggagggggagagtcacatcatttggattctaccaatctgcaggctctatctttggcaacatgtaaataattagactatacatctgtttctcaagtatggcaagaccaatagtttgaatttaattatcaatgctatggtatactttctggtcatattttagttatgtcagttttaaggtaagttttttcatttattaaagcccttaaatgagattttagactgccaaagagaagaggcagtccaattgacctaactgaaatgagatgaccagtatatagagcctagatggactgtagcagctctacccctttgttttacaaggtaaatcattttaaaaattaccttttttgatcagtgggtaaaagttaaagggatctttaatttttgatatattcaagttaattttctaaatgtgaatcagtccttggactgcaactatatattcacctacaaaatcccaatcaaaaaattacatgagcctgtcaagcagatctttagttttccacttcacataagatcgttaatgttctaaattaatctattcatttagatgatttttgtcagttcttaaatgggatataataaatttagcattttcatcttaacaagcaaaagagttaaaaaacaaaacaaaacactactccaagccaaatacattctagctggttaattccagacttgtcccaagtggttccccaacctcttttccactggtaatttcttttcatgcaggcagaatataggggtgcgagcgctgtgagttttacatatgagcttggataggggaactgaagcgagtcaggagccctgctggaaaaggggtttgccattggattgtctgtggcctggtttctttccagtagtacagtaatagggtagattgaaaacaagtatttacttctgattctgcctgcatttagtgtgaaatgctcttaaggtattgcttctaaaaagcaaattaagcagttaagtataaagtccctgaattcatatttcaaaataaggcttttatgagatttttattaaaaattgcaatagccatcacaaatctgagtttttctaggggtgagagaaaactgtattgtgatgagctagattagttgtagttccagaataagaacaaaaattcagagttgtgtggtgcccatcattgagtaaatgaaccctaaaaatgaataagctaatgaactagttcatggaattatttctgatggtcttttgacctgatgctgccatactgcagtgttaccagctccccctagaaaacggaactgtttaaaaacacagcaagttacagaaaccattttattctacagccattggggtacttcagtttatgggatgtttttggaaacttctgctttgggagggatgaagatcattgataaatgttatttgctttctgagttttggggtcatttcattgcttatcaatgaagggcagacagaggagagaatatctcaagtcttttctgataaaaggcttgcttgagggagcttataacttgcacctagagggtttacccactttgtggatttgatttatccaccaaccacagcaaccaataatgtcaagattctaggagtttatgaaagaggctagtatgttttcattttgagtcagacattcttttctcattctcaaatctgttttaaatgctccaattttaaaaatgccaatgaaaattttataatgcttctgtagtaaccatatgcagtttactttgaatttaggaaaacagttttgtatgatgaaatattgtgcagaatctgtaaataaggtagcttaaaaaaaaaaaaaaagtctaattagaatatgattaatccttaaaatgtagaaactagagattgtgttgagtcagaactgttatgtttgtatccaggtttctattcaccacatataccatcttagaatacacacatatctgtgagttataatttaaagtggtcatccagggaaatgatcatggagtgctactacagatgtacagttttacactactgatgtgttcttgccatacccaagtagggaatcacttccaggaaaacaagtcctcaagcactcaatgactttgtaaacccatgactgaaacaagactcatctgaggcagtaggactggtgggattctactgacttcttagtatcacatggcaccatcacaaatgcattgttagagcagcaacatccagagttcttaagcttgtaccctaacacacaaatttgacttctaaccctgaaatatcctatatatatttctaaaactgtttgtagttttcttgagaaaaagcactttataatttactcagttttcagtaataaaattaacactgacttgaatgtatttaaaaaaattctccacagttttgtcttcctcagattgtttttatccttattctctgaaattcctgttttattgtctaagacttaagagattcagctttatcaagttagagtacagtgtaattcaaattctccctcccttgggcatagttactgaagttcaaatttccttaagtattttttaaaaacctgattttagttttttttttcctgcagaatcttaacttttccattattctggatgacaaataaacatttattaaaatgtgttagaattagtatttactaggttcctaaattgtcagtataggtactttgatcacacatcaaaatggaatttctgcaacttaaagcattttgttacaaattgtagttgaaatagaattttatctatttgtctggatgaataggttgttgggaatgaaccagttatctgttcttttcttccaaatgcaaatggtgcagctagttgataatagtatattctcatcctactataaagtgcaaatttcaccttaattttgcatattttaaaatttttgtttaccctttgtagcatatttacattttagcatttgctaacattgatttaatgtgttaaagattcattttggatatagggttgacttgttggagatactagttcataattttaaaattcccaagagaagtgtctttgaagtggtaaacacagtgcactttaagccacttctcttcccacagagtccagctgaaggaggtaagggcatgctgcatgagagtaatgccgtgatgagtgtcttactctggtaaaatgccatttacaatgcctggagactgaacactgaacaaaacatagtgcccttagaatttcactggaaaaacatgtgaatcacataagttagttggcaaaaggaactgatgtgtatgtggtggggttgctttgaataaagtatttcctaacctattctggggagaacgctcaactgatcttagagaagtgtgaaatcagtttcatagacttagggaaaaatctgaagtgcttgcactgtgagggcagaggcctgcctcattagtctagctgtatgaacatgtcagtccacagaagcagtttttacctgtactcatctgcccttcagtcagctttgtgacagaagggcaaacatcttcacagaagaaaaagttcagaaggttggcattggtggtttcattgctacagaataatagtgttacttgatagtatctgactaaaagagctctcattttctagtacttagtagtaaaaagaatgtggtggagtcctccagatgtctagtgtgggtggaggatatcaactggttatttcagtgatctacagccttaccttttgaatgctaaatgtctggaaacttcaggcagggtcctacaaaacaaactgccatcaagattggtgtgtaccatgaaggcagttttagatagtttgactgttcatggctgcaagaaagacctaaaattcaagggcccgtgaacttcagatacgtaaaaggaatatcacttctgttctagaagagtactaattagacttgtttgtgaaatttgaaaatttggctttgagacactggtaacaaacatatctgagccctcctaagtttggtcagcacggagtagtagctctggcatcatgtggctgtgtagagctccagtgtgatttcaagccccctctaaaaactgccttagtctgcatgaagtagttaactctccaaagtgctttttgtctggcaaatcccttcacaattttcacctctcgtctaaaagcttccttaaaggaagccttccttgatcccttaggctaggttaggtttccagtctgtgttctcatagcactctgcactttttggttccttaaagcaactctgtgttattttttagaattttaatctgaatctcgtgtgtcacatacctaggtcagaaaatactggaacaatgaagttaagatttagtaattcaaattatgtaaaatgctcatatatatgtttttagattagcagctttatgatgccgatgctgaaggaacttttcaccccattcttacaagtctgctactgttttaagtgacatccttatagttgtagataagcaaatgtaaggttatatcaatgtgaagaagcccttagtatcacattttaaaatttatcatttagcaatatgacttttaaatttattgtttccgaatgagtgttgttgaggaatgttagcagtagtaaaatcttgtgttacaagatttttgcatttacatgaactttcactcatttttcagaatttgttcctagagacagagaacccaatacaaaagtgagaacatgtatgcataatcagaaggatgcagtgcagatgcctagtgaaactctgaaagcaaaaatggtacctgagaaagttccccgcagatgtgctactgttgctgcaaataaaataaagataatgagtaatctaaaagaaacgatctcaggaccagaaaatgtctggattaggaagagtagcagaaaactgccccatcgaaatgcttctgctgcggctaagaaaaaattactgaatgtttataaagaggatgatacaaccataaattctgaaagtgaaaaagagctagaagatattaatagaaaaatgctttttttaagggggttcagatcctggaaagaaaatgcacaatagtgactatgagaatgtagaagtggcatctgaaaacaattggtacacaagtaaactggcagttacattctgctcccagctctaaaattactcccttattggcatctttggaggaattttctaaaagccataatccagtgggttcctcccagtcagctcttgtacagacatgtgctctggggaattctgaggaggaaataaattgcagagtctgtaggtggagaggtggaaagaaaagacaaatggcctgctataagactactattcctttccagaatgcaaggccttgaagacatgattccttagaggaagaatataatgggaagtgtacaggctaggaagaacttgaagtgaacaaatttcaaaatcttaacctgatgctaattttcagggttctccattacagtgtaaaaattcagaccacgacaactatggtgtcatgaggaaaaaaaatcaggcatttttccaaaggaagtgctaatgggcctatttgacttctgagtgaagcaaaaactacccagatccattccctacaattcacatccccaaaggtcaaaaacaaactaggaggacctgggaatttcagctggagatactgattattgagttctgaagtagagtgttggaaataggcaattagagaaagtccattgatgtcattttgtttataatattgcagttcatactgaatgaccacttgatatgactaattcagggaatatatatttttctatgaaagctatgaatgttactatcacggcttttccttatttttacttgtatgtagcagcatttacagaaatgccaaaaatgtgcctcattaagaggcaggtcttaatcagttagataaaaataaaatgtatagcttaagatcaaaacagtcatatttttagatacagtgaaatcttttatgtttctctacagcaccttaaaaattagaacttgaatactttgagtaaacttactacaatctcatcccaacaaactttaatggtagcatgtttggcctatttcattgtggcctgtactaggattagaaaatttggtcgtggtataacaaagaagtgtatttacaataggatttaatttgttgttaatatgtatttgttgaaattaaaattgccagattaaatgaatatactgtcgcatctttttaacatagtaacgtgttactggaaaaattaagttgttgaaagtaagttgttttcccatttaaaaatatctgaatatatgatttgcatgtgtaaatctgaaaaactaaactacagaaacctagggttttctatttcttttttaagtcaaatgcatttttttttttgttatacagatgaaccaagtgtctaaaatacttgagaaatttgtggttgcatgtctgttttaaaaaaaaggctttttgttttttagcataagccagaatattctaacctactaagtctgtgtcctttgctccttttgtagtatactttcatctaaattactgatcccaatatgttgatacacaggtgagaaggaagaattcctaataaactgctattacttttaggtgcatggggtttgatttttgagctctaatgaaatgcttaaacttctttccagttcaaattttacacttaatttataatatttattgagtatattatgtcctcaacaagtaactataaaatgaaatacttaactcggtgaagactattttatgcaaagtttttttttttttttttttttttttttagcaatttcagtgtaatgaaagaatttaagctttgaatttataatttgctgtggtggggttaatttctgtcagtatttgagattgtattatcagtcttgcataatgaaatccttttttggctaagtatttaattcgaacatatttgcctttttaaaaagtgcttggcctaaacttattgtaactgcatgaaataagcatttgcttaaaacttaacattgtaaaattgttctctctgaaatgtgtgcagaatttaaatcatggccaaatgtattactattaccctatttacagtaatttgctttgcagaaaatatttcttcatcatggaactgtgaaatcaaattgaagatcttactggtaaaaatgacaaattaacaaaaggactaagacaagtggtgcccaaacaacctttttattctgcagttccatcatcataatagaccagttaacccaggagtcctaatgttttaaaacatcattgtggtgatcttgtttattctatctcactaaggatatccagtttcctaagctcttactggctagcaatttcgtcttaattttattgctaaatgttcaaattttgcttccaaactcactttatttttgcagatgtgtacatctgctaaatactaattttatgtaaatgattttgttgattatctttccacatcttaaaatgtttctaacagctttgagattttatctcaacaggctctctctgaccccaaagtagtacttaccttcgtgactactgacaaagtcacaaaatgcaggcgatgtcatgtatttcggtacaactaaatctaggaaacggttttttcattgcattactgcatattttcattttcatttaaattatgtcccctttttctcttgcttgaaacagtgctcctcgaactttgtcttccagcacattttaaagagaaccaattaaagaacaatcacacattctgcttattaaaggctatttaaaaagaaacattttgtattagaaaatggccaactttaaaacactattttttacactcataaaaatgttttttaaatcgccttgacaatcatcagcttttgaaatgtgaattcctattgccagagtaaaggtctcgtttttatacca

SEQ ID NO: 14 - DNA, 19247 bp, Homo sapien
ggtccaggcggcgcgcacggtatggcggcggcggcggcggcggcggcggcgcgcgcctgagaagaggggacgccagcccggtcaggcctcggcgcggcctacacgctccgctcgctcgctcgctcccgcctcccgccccgcgcccggccatggcggagccgtcgtccgcccgacgcccggtgcctctcatcgagtcggagctgtacttccttatcgcccggtacctatcggcgggcccgtgtcggagagcggcccaggtgctggtgcaggagctggagcagtaccagttgttgccgaagagattggactgggagggcaacgagcacaacaggagctacgaggagttggtcttgtccaataagcatgtggctcctgatcatcttttgcaaatctgccagcgcatcggtcctatgttggataaagaaattccacccagtatttcaagagtcacttctttacttggtgcaggaaggcagtctttgctacgtacagcaaaagactgcaggcacacagtttggaagggctctgcctttgctgctcttcatagaggaagacctcctgaaatgccagtgaattatggttccccaccaaatcttgtggagatacatcgaggaaaacaactcacagggtgttccacttttagtacagcatttccaggaactatgtatcagcatataaaaatgcacagaaggattctcggacatctatctgctgtttactgtgtagcatttgataggacaggacatagaatctttacaggttcagatgactgtttggtaaagatttggtcaacacataatggccgcttgttatctacattaagaggtcattctgcagaaatttcagatatggcagtaaactatgagaatacaatgattgctgcggggagctgtgataaaattattagagtgtggtgcttgagaacttgtgccccagttgctgtgctccaaggacacacaggatcaattacatctttacagtttagcccgatggccaaaggctctcaaagatacatggtttccactggtgctgatgggacagtttgcttttggcaatgggatttagaatccttaaaatttagcccacgtcccctgaagttcactgaaaagcctaggccaggcgttcaaatgctttgttcttcttttagtgttggtggtatgtttttagccacaggtagtactgatcatgtaatcagaatgtattttttgggttttgaagcacccgaaaaaatcgcagaacttgaaagccacactgataaagtagatagtatccaattttgtaacaatggtgatcggttcctaagtggtagcagagatggaacagcacggatttggagatttgagcagttagaatggaggagcattttattggatatggctaccagaatctcaggggacttatcttccgaagaggaaaggtttatgaaacctaaagtaacaatgatagcttggaatcaaaatgatagcattgttgtcacagctgtgaatgatcatgtcctcaaagtgtggaattcttacactggacaactgcttcataacttaatgggacatgctgatgaagtatttgttctggagacacatccctttgattccagaattatgttatctgcaggacatgatggcagcatatttatatgggatattacaaaaggtaccaagatgaaacattattttaatatgattgaaggacaaggacatggagctgtgtttgactgtaagttttcacaggatggacagcattttgcctgtacagattctcatgggcaccttctgatatttggttttggatgcagcaaaccatatgaaaagattcctgatcagatgttcttccatactgactatcgaccacttattagagattctaataattatgtcttagatgagcaaactcagcaggctcctcatcttatgcctccaccattcttggtagatgtagatggaaatcctcatccaaccaagtatcagagattagtaccaggccgagaaaattctgcagatgaacatttgattccacagctgggctatgtggcaacaagtgatggagaggtgattgaacaaattataagcctgcaaaccaatgataatgatgaacgcagcccagaatcgagtattcttgatggaatgataagacagttgcagcagcagcaagatcagagaatgggagcagatcaggatactattccaagaggactttcaaatggtgaagaaacaccccggagaggttttagaaggctgagcttagacattcagtcccctccaaatattggtctgcgtcgtagtggacaagttgaaggtgttcgtcagatgcatcaaaacgctccacgcagtcagattgctacagaacgtgacctgcaggcttggaaacgaagagtggttgtaccagaggtaccactaggcatatttaggaagctggaagacttccgattagagaaaggtgaagaggaaagaaatctttatataataggaagaaaaagaaagactcttcagctctcacataagtcggattcagtggttttggtatcacagtctagacaaaggacatgtaggcgtaaatatccaaattatggtagaagaaatcgtagctggcgtgagttatcttctggaaatgagtcttcaagctctgtaagacatgagacttcctgtgatcagagtgaaggttctggttcttcagaagaggatgaatggagaagtgacagaaaaagtgagagttacagcgaaagttcaagtgactcttcatctagatattccgattggacagctgatgcgggcatcaatttgcagcctcctttaagaacatcatgtcgtcgacgaattactcgattttgtagtagttcagaagatgaaatatctactgagaatttatctcctccaaaaagaagacgaaagagaaagaaagaaaataagcctaagaaggagaatttgcggaggatgactccagcagagcttgcaaatatggagcatttatatgaatttcaccctccagtttggattactgacaccacacttagaaaatctccttttgttcctcaaatgggtgatgaggtaatatattttcgacagggtcatgaagcttatattgaggctgtaagaagaaataatatttatgaactgaaccctaataaggagccatggagaaaaatggatcttagggatcaagaattggttaaaatagttggaatacgatatgaagttgggccccctacactctgttgcctaaaactagcatttatagatccagcaactggaaaacttatggacaaatctttctctattagatatcatgatatgccagatgttattgactttcttgtattgcgtcaattttatgatgaagcaagacagaggaattggcagtcttgtgacagattccgctctattattgatgatgcttggtggtttggaacagtgttaagtcaagagccatatcaaccacagtatcctgatagtcatttccagtgttatattgttaggtgggataatactgaaattgaaaaacttagcccatgggacatggaaccaattcctgataatgttgatccacctgaagaattaggagctagtatttctgtcacaacagatgagctagagaaattgctctataaaccacaagctggtgaatggggtcagaaatcaagagatgaagaatgtgatagaattatcagtggtatagatcaacttttgaatcttgatatagcagcagcttttgcaggccctgttgatttgtgtacatacccgaagtactgtactgtagtagcttatccaaccgatctttacacaattcgaatgagacttgttaatcgattttacaggaggctgtctgcgttagtttgggaagtcagatatatagaacataatgccagaacatttaacgaacctgagagtgtaattgcaagatcagctaaaaagataactgaccaacttttaaaatttatcaagaatcaacactgtacaaatatctcagaactttctaacacatctgaaaatgatgagcaaaatgctgaggatttggatgatagtgatcttcctaaaacatcttctggaagaaggagagtccatgatgggaaaaaaagcatcagagctacgaactatgttgaaagcaactggaagaaacagtgtaaggaactagtgaacttaatttttcagtgtgaagattctgaaccatttagacaacctgttgatttggttgaatatccagactacagagatattatagataccccaatggattttggaacagtaagggaaactctagatgcgggaaattatgacagccctttggagttttgcaaagacatccggctgatatttagcaatgcaaaagcgtatacaccaaacaaaagatcaaagatttatagtatgaccttgagattatctgccttatttgaagaaaaaatgaagaaaatctcttctgattttaaaattggtcaaaaattcaatgaaaaacttcgaagaagccagaggttcaagcaacggcaaaattgtaaaggtgacagtcagcctaacaaaagtatcagaaacctcaagccgaagaggttaaaatctcagacaaaaataattcctgagttggtaggttctcctacccagtctacctcaagtaggacagcttatcttggaacccacaagacaagtgctggtatctcttcaggtgttacttctggtgactcttcagattcagcagaatcatcagaaaggaggaaaagaaatagacctataacaaatggttctacattatctgaaagtgaagtggaagattctttagctacctctttgtcatcgtcagcttccagtagttctgaggaaagcaaagagagttccagagctcgtgaatcctcctcacgcagtgggctatccagaagcagcaatctcagggtaaccagaactagagctgctcaaagaaaaactggtcccgtttcattagcaaatggatgtggcagaaaagccactcgaaagagagtctatttaagtgattctgataacaattcattggagactggtgaaattctaaaagccagagctggaaataaccgaaaagtcttaaggaagtgtgctgctgtggctgccaataaaataaagctaatgagtgatgtagaagagaattctagctctgaaagtgtctgttctggtcggaagctgcctcaccgcaatgcttctgctgtagctagaaaaaagttattacataattctgaagatgaacagagcttaaagtcagaaattgaagaagaggagctaaaagatgaaaatcaacyattaccagtgtccagttctcacactgcccagagcaatgttgatgaatctgaaaacagagactcagagtcagaaagtgatttgcgggtagcccggaaaaattggcatgctaatggttacaagtcccatactccagcaccttcaaagacaaaatttcttaaaatagagtcttctgaggaagactctaaaagtcatgattcagatcatgcatgtaacagaactgctggcccatcaacgtctgtgcagaaacttaaggcagagagcatctcagaggaagcagattctgaaccaggaagatctggtggtaggaaatacaatacatttcacaagaatgcgagtttctttaaaaaaaccaagattctgagtgactcagaagactctgaatctgaagagcaagatagagaagatgggaaatgtcataaaatggaaatgaacccaatttcaggaaatctgaactgtgaccctattgctatgtcccagtgttcctcagatcatggatgtgaaactgatttagattcagatgatgacaaaatagaaaaaccaaacaattttatgaaagattctgcatcacaagacaatggactaagcagaaaaatttccaggaaaagggtctgttccagtgactcagacagtagtttacaggtggttaagaaatcatcaaaagccagaacaggtctcctgaggattactcgaagatgtgcagctacggctgccaataagatcaagctcatgagtgatgtagaagatgtcagtttagaaaatgtgcacactagaagcaaaaatggaaggaaaaaacctctccatcttgcttgtactacagctaagaagaaattgagtgattgtgaaggaagtgtacattgtgaagtaccaagtgaacagtatgcctgtgaaggcaagccacctgatcctgactccgaaggtagtacaaaagtgcttagtcaggctctaaatggagactcagactctgaagatatgttgaattcagaacacaagcacaggcataccaatattcacaaaatagatgcaccttctaaaagaaaaagttcctctgttacatcttcaggagaagattcaaaaagtcatattccagggagtgagactgataggacattttcttcagagtcaaccttggcacaaaaagctactgcagagaataattttgaagtggaactgaattatgggctgcgcaggtggaatggcagaagactcaggacctatggaaaggctccttttagtaagacaaaagtgattcatgattcacaggaaacagcagagaaggaagtaaaaaggaagagatcgcatcctgaattggaaaatgtgaaaatctctgaaacaactgggaattcaaagtttagacctgatactagttccaaatcatcagatttgggatctgtaactgaatcagatattgactgtactgataatacaaaaaccaaaaggaggaaaacgaaaggaaaagcaaaagtagttagaaaaggtaaaacttttacagctaacatatctaaaactgtgagacgtcaaagacaaagcaaacgccctaggttaagtgtggatgataatgactgggaggatttggactatgcaaaatctaaaagagttcttcgacgttcaaaaataaaaacgagaaatcagggtagaaggactgtgagataccatgatggggatgatgacagaagtttagaaaatgtgttagatttcaatggttgcaccttatgaccttgagggaaagccagttcatttaagaggaaatggactggcatttatggtgaaagctggctgttaaaattatttttttgtcttacaattcagggaatatatttatatttttctatgaaaagttatgaatgtgactaaatcatgactgttatttttatttgcacttgctggtctttgtagcagcattcagcacaggtgccaaaatatgcttcattttgggggcagatctattttgacagtatttgactacatatagcaagagtttgaaatatgttaaacactagacatcctggttatcaaaaccaatgagcattactttcatggcagcaagtgtcatgcagttattttctgaatttgtcaaagaggcagtagtttctaacccctgttctatagtagttacaacaatttcacaacctatgtttacagattcttcataaatacatgcatactgacactataatcatgggaggtgtaaccatgattagtaggcgaggtacctaccactttttttttttcttcccctggctacttgagtagaatgcattataccagatctggtcactttcattgaaatggtttctaattttcttcccaagtgctgttgggtttttttcttcttaaggaaaacgttgtcacttttatgttataaacttgaatttataaagtgctggtaaattatttttaatgatttgagtgcatgttttaaacctctaggaccagagcatagtcagagcattttcttttaaattgtgcactaacaaaatgctatataatctgtcttctgtccaagatctcctggtttccattgtaagggatttaaccaaaatcttgctcttccataatcttactctgtgaaatagaggaattcgtgtgccttagatttagaagtgtgttctttaatagagtgtacagggctaaaagagtatttaagttaatatgtaggtttcccccatctgtattccaattgtagaggtgagttttgttaagagtacaattgcaaatcttatctatataggaaaatagctaaatgtcattctccatctctttgttttagtttactgcttccatgtgcaatcctaagcattctttgctggggcaactaaatgtatctttattagtgacttctagtccaaatataagaaactgtcatgttttgtgggaaaataattttataatccatttaaagtgaaagtttatcacacaaatagtacacttattttctaaccaaatacttgataggttatgctactccagtgtagatggccattcctaacttgtttgtgcctgaagatggacttgattcaaatggtttacatatttagtgggtaagggatatgttacagtaccccacctgtaagttatttattagccctaattgtgtttgatttcagacaaaattaacccttttctcctgtgtatctttgaagtggcagataaggtgaagcatcagactggtatcaatattagacaatgttatttattagccctaattgtgtttggtttcagacaaaaccttttctcctgtgtatctttgaagtggcagacaaggcgaacatcagactggtattaatgttagagaatgttctgaagtgttcctattttgtagttatctattccatttgacatagtagaaggtacattttctttctactctgatgcatggggaaggatgtttttggacattatcaactgagataggtgggaaacctcctctcatttgtggcttagagagctatcaccatttcagaactatgatgcttttcttctcagaacttgtgttaagtagatagtaaacagattgattcatgataattgtccttgactaagactgaaaagactaatgggatgccttttactttgctaattttaaaaactggtgatagatgtcaaatccattaatttatttaaactcttcttaaccttctcttttataatctgttctcaggttttaactccatgtttaccatcatttgcaaaaaggtaccaaaaaaatccataaataaatatggaatacattcataagtacatacattcttttggtataaaacaatattttgacagtttaggcttcattaatagaactattctgattatttggactgcattaattggtcattgactggccatccaattaccattttttctttcagtccaaaatagttagacccttgcatacagaagtggtattttggtttttaatcagatttggtttcatcagaagcagcaagaatggacctgatgtctttaaaagcatagccgacaatggtagcttctcaagttatgaaataaaactgagagataatggagaaaataatttttatgggtttttttggttatggtgctattcctaaggttaactttgaatatgtgacacacacactcctaagtacctttaaggaaaattaataaatcattaatagttaaaatgtttacattgagcactagaacatgtttggccttttttttctacgttatgcaaaatgcccagggatttaatgcacaggtgtactttaatgtttagggtcagtttgtagtattcttgagaaaaagataaagggttataatttgaatgtgaactgatccagaaataagtgctgtacctttccactgcacttgaagttcaacttaatggtgtatgtgaaaaacaaaaactactttggttgtgtatgtccaaagtcctatggttttattcatttatggttttacaggctttgaagtactcagatttgatttttgctttcttggaaagactcactttaccaagcatataaaggaaaaatgatttcaaacattgacaagatagatgagtgttaacaaagctttcttttttcgtgtcctccttatttaaaaaggtatacttacaatgtgaagtaacttatgaataaaaggaaaagtttatcccatattcaaataattcctaaggtcagcctccctttttgtaagtggcaaatatctgattaaatcatttctcagtttattaatccttggaaacaatgatatagcagttactcacagcttgtaaattacaacagaaaggttcctttcaaatagtagagctgcacctaaagaggaaattgggtttataagaaaatggaggcaaagaacttaagttttaagaaaaagcacttcaaaacagaagggcaaatggaaaaggggaatataaaacaaaccaataaaaataccatctgagggtgttactgtccaaaagtaaagaataagatgcatcactaagccctttgcactcgttatgacctcgtaagtaaaaattatcacttagaataaggggtgcacactacattccctctgtcttctagacttttttttttgtagaagaatcagaaaacaatttactaacctccctgtttgatattaaaaataggaagaattttaatattttctgttagtacaagttgaacttgattgtgccaactgaaaccccagaggtttgtatatcagtagaatgcaagaacattgttaaaggtgcttacgatcttttttgttttcctttccactccattgtatcaattttttgagtaacttttaaatggctagaaaatggtctttttgctttgcccttttaaagctgaaataaccagctccattcttttcatgaatagtaagttgatatatttatttatcaggtatcttgcagttgtcaccaaatactgtagttttcttatgttgtatggaaattatagttcaattattttaatgtgatggagtgcaacaagtcattgtagaacttttcacctgttaatgttgaagttatacctctgaatttctgctgtggatatcaaggaaataataaagcagaaaccccaagaaatttgcaacttaacagtttgagactgtctcttatcctagtatttgggaagagaaggaataaatttgtcaaaactaggtgagaaaatagagcattgtgggaaaaactgagtccaactagattagcaaatgttaattcctagctcaaactgtgaatagtaaggattgtaaagtatgtaatgctaagggctgtgttgtcttttcttacgattttaagttttaaaggctgttaaattacagagatgttgcccaaggatacatggggattctcaaaagtaagagatttttacctttttcataatctgccaagctggttcctaatatattgttaaattggtagaaaaatatctttaaattggtgtctgctcaagaattgcttttctagatttgatggagggagggggagagtcacatcatttggattctaccaatctgcaggctctatctttggcaacatgtaaataattagactatacatctgtttctcaagtatggcaagaccaatagtttgaatttaattatcaatgctatggtatactttctggtcatattttagttatgtcagttttaaggtaagttttttcatttattaaagcccttaaatgagattttagactgccaaagagaagaggcagtccaattgacctaactgaaatgagatgaccagtatatagagcctagatggactgtagcagctctacccctttgttttacaaggtaaatcattttaaaaattaccttttttgatcagtgggtaaaagttaaagggatctttaatttttgatatattcaagttaattttctaaatgtgaatcagtccttggactgcaactatatattcacctacaaaatcccaatcaaaaaattacatgagcctgtcaagcagatctttagttttccacttcacataagatcgttaatgttctaaattaatctattcatttagatgatttttgtcagttcttaaatgggatataataaatttagcattttcatcttaacaagcaaaagagttaaaaaacaaaacaaaacactactccaagccaaatacattctagctggttaattccagacttgtcccaagtggttccccaacctcttttccactggtaatttcttttcatgcaggcagaatataggggtgcgagcgctgtgagttttacatatgagcttggataggggaactgaagcgagtcaggagccctgctggaaaaggggtttgccattggattgtctgtggcctggtttctttccagtagtacagtaatagggtagattgaaaacaagtatttacttctgattctgcctgcatttagtgtgaaatgctcttaaggtattgcttctaaaaagcaaattaagcagttaagtataaagtccctgaattcatatttcaaaataaggcttttatgagatttttattaaaaattgcaatagccatcacaaatctgagtttttctaggggtgagagaaaactgtattgtgatgagctagattagttgtagttccagaataagaacaaaaattcagagttgtgtggtgcccatcattgagtaaatgaaccctaaaaatgaataagctaatgaactagttcatggaattatttctgatggtcttttgacctgatgctgccatactgcagtgttaccagctccccctagaaaacggaactgtttaaaaacacagcaagttacagaaaccattttattctacagccattggggtacttcagtttatgggatgtttttggaaacttctgctttgggagggatgaagatcattgataaatgttatttgctttctgagttttggggtcatttcattgcttatcaatgaagggcagacagaggagagaatatctcaagtcttttctgataaaaggcttgcttgagggagcttataacttgcacctagagggtttacccactttgtggatttgatttatccaccaaccacagcaaccaataatgtcaagattctaggagtttatgaaagaggctagtatgttttcattttgagtcagacattcttttctcattctcaaatctgttttaaatgctccaattttaaaaatgccaatgaaaattttataatgcttctgtagtaaccatatgcagtttactttgaatttaggaaaacagttttgtatgatgaaatattgtgcagaatctgtaaataaggtagcttaaaaaaaaaaaaaaagtctaattagaatatgattaatccttaaaatgtagaaactagagattgtgttgagtcagaactgttatgtttgtatccaggtttctattcaccacatataccatcttagaatacacacatatctgtgagttataatttaaagtggtcatccagggaaatgatcatggagtgctactacagatgtacagttttacactactgatgtgttcttgccatacccaagtagggaatcacttccaggaaaacaagtcctcaagcactcaatgactttgtaaacccatgactgaaacaagactcatctgaggcagtaggactggtgggattctactgacttcttagtatcacatggcaccatcacaaatgcattgttagagcagcaacatccagagttcttaagcttgtaccctaacacacaaatttgacttctaaccctgaaatatcctatatatatttctaaaactgtttgtagttttcttgagaaaaagcactttataatttactcagttttcagtaataaaattaacactgacttgaatgtatttaaaaaaattctccacagttttgtcttcctcagattgtttttatccttattctctgaaattcctgttttattgtctaagacttaagagattcagctttatcaagttagagtacagtgtaattcaaattctccctcccttgggcatagttactgaagttcaaatttccttaagtattttttaaaaacctgattttagttttttttttcctgcagaatcttaacttttccattattctggatgacaaataaacatttattaaaatgtgttagaattagtatttactaggttcctaaattgtcagtataggtactttgatcacacatcaaaatggaatttctgcaacttaaagcattttgttacaaattgtagttgaaatagaattttatctatttgtctggatgaataggttgttgggaatgaaccagttatctgttcttttcttccaaatgcaaatggtgcagctagttgataatagtatattctcatcctactataaagtgcaaatttcaccttaattttgcatattttaaaatttttgtttaccctttgtagcatatttacattttagcatttgctaacattgatttaatgtgttaaagattcattttggatatagggttgacttgttggagatactagttcataattttaaaattcccaagagaagtgtctttgaagtggtaaacacagtgcactttaagccacttctcttcccacagagtccagctgaaggaggtaagggcatgctgcatgagagtaatgccgtgatgagtgtcttactctggtaaaatgccatttacaatgcctggagactgaacactgaacaaaacatagtgcccttagaatttcactggaaaaacatgtgaatcacataagttagttggcaaaaggaactgatgtgtatgtggtggggttgctttgaataaagtatttcctaacctattctggggagaacgctcaactgatcttagagaagtgtgaaatcagtttcatagacttagggaaaaatctgaagtgcttgcactgtgagggcagaggcctgcctcattagtctagctgtatgaacatgtcagtccacagaagcagtttttacctgtactcatctgcccttcagtcagctttgtgacagaagggcaaacatcttcacagaagaaaaagttcagaaggttggcattggtggtttcattgctacagaataatagtgttacttgatagtatctgactaaaagagctctcattttctagtacttagtagtaaaaagaatgtggtggagtcctccagatgtctagtgtgggtggaggatatcaactggttatttcagtgatctacagccttaccttttgaatgctaaatgtctggaaacttcaggcagggtcctacaaaacaaactgccatcaagattggtgtgtaccatgaaggcagttttagatagtttgactgttcatggctgcaagaaagacctaaaattcaagggcccgtgaacttcagatacgtaaaaggaatatcacttctgttctagaagagtactaattagacttgtttgtgaaatttgaaaatttggctttgagacactggtaacaaacatatctgagccctcctaagtttggtcagcacggagtagtagctctggcatcatgtggctgtgtagagctccagtgtgatttcaagccccctctaaaaactgccttagtctgcatgaagtagttaactctccaaagtgctttttgtctggcaaatcccttcacaattttcacctctcgtctaaaagcttccttaaaggaagccttccttgatcccttaggctaggttaggtttccagtctgtgttctcatagcactctgcactttttggttccttaaagcaactctgtgttattttttagaattttaatctgaatctcgtgtgtcacatacctaggtcagaaaatactggaacaatgaagttaagatttagtaattcaaattatgtaaaatgctcatatatatgtttttagattagcagctttatgatgccgatgctgaaggaacttttcaccccattcttacaagtctgctactgttttaagtgacatccttatagttgtagataagcaaatgtaaggttatatcaatgtgaagaagcccttagtatcacattttaaaatttatcatttagcaatatgacttttaaatttattgtttccgaatgagtgttgttgaggaatgttagcagtagtaaaatcttgtgttacaagatttttgcatttacatgaactttcactcatttttcagaatttgttcctagagacagagaacccaatacaaaagtgagaacatgtatgcataatcagaaggatgcagtgcagatgcctagtgaaactctgaaagcaaaaatggtacctgagaaagttccccgcagatgtgctactgttgctgcaaataaaataaagataatgagtaatctaaaagaaacgatctcaggaccagaaaatgtctggattaggaagagtagcagaaaactgccccatcgaaatgcttctgctgcggctaagaaaaaattactgaatgtttataaagaggatgatacaaccataaattctgaaagtgaaaaagagctagaagatattaatagaaaaatgctttttttaagggggttcagatcctggaaagaaaatgcacaatagtgactatgagaatgtagaagtggcatctgaaaacaattggtacacaagtaaactggcagttacattctgctcccagctctaaaattactcccttattggcatctttggaggaattttctaaaagccataatccagtgggttcctcccagtcagctcttgtacagacatgtgctctggggaattctgaggaggaaataaattgcagagtctgtaggtggagaggtggaaagaaaagacaaatggcctgctataagactactattcctttccagaatgcaaggccttgaagacatgattccttagaggaagaatataatgggaagtgtacaggctaggaagaacttgaagtgaacaaatttcaaaatcttaacctgatgctaattttcagggttctccattacagtgtaaaaattcagaccacgacaactatggtgtcatgaggaaaaaaaatcaggcatttttccaaaggaagtgctaatgggcctatttgacttctgagtgaagcaaaaactacccagatccattccctacaattcacatccccaaaggtcaaaaacaaactaggaggacctgggaatttcagctggagatactgattattgagttctgaagtagagtgttggaaataggcaattagagaaagtccattgatgtcattttgtttataatattgcagttcatactgaatgaccacttgatatgactaattcagggaatatatatttttctatgaaagctatgaatgttactatcacggcttttccttatttttacttgtatgtagcagcatttacagaaatgccaaaaatgtgcctcattaagaggcaggtcttaatcagttagataaaaataaaatgtatagcttaagatcaaaacagtcatatttttagatacagtgaaatcttttatgtttctctacagcaccttaaaaattagaacttgaatactttgagtaaacttactacaatctcatcccaacaaactttaatggtagcatgtttggcctatttcattgtggcctgtactaggattagaaaatttggtcgtggtataacaaagaagtgtatttacaataggatttaatttgttgttaatatgtatttgttgaaattaaaattgccagattaaatgaatatactgtcgcatctttttaacatagtaacgtgttactggaaaaattaagttgttgaaagtaagttgttttcccatttaaaaatatctgaatatatgatttgcatgtgtaaatctgaaaaactaaactacagaaacctagggttttctatttcttttttaagtcaaatgcatttttttttttgttatacagatgaaccaagtgtctaaaatacttgagaaatttgtggttgcatgtctgttttaaaaaaaaggctttttgttttttagcataagccagaatattctaacctactaagtctgtgtcctttgctccttttgtagtatactttcatctaaattactgatcccaatatgttgatacacaggtgagaaggaagaattcctaataaactgctattacttttaggtgcatggggtttgatttttgagctctaatgaaatgcttaaacttctttccagttcaaattttacacttaatttataatatttattgagtatattatgtcctcaacaagtaactataaaatgaaatacttaactcggtgaagactattttatgcaaagtttttttttttttttttttttttttttagcaatttcagtgtaatgaaagaatttaagctttgaatttataatttgctgtggtggggttaatttctgtcagtatttgagattgtattatcagtcttgcataatgaaatccttttttggctaagtatttaattcgaacatatttgcctttttaaaaagtgcttggcctaaacttattgtaactgcatgaaataagcatttgcttaaaacttaacattgtaaaattgttctctctgaaatgtgtgcagaatttaaatcatggccaaatgtattactattaccctatttacagtaatttgctttgcagaaaatatttcttcatcatggaactgtgaaatcaaattgaagatcttactggtaaaaatgacaaattaacaaaaggactaagacaagtggtgcccaaacaacctttttattctgcagttccatcatcataatagaccagttaacccaggagtcctaatgttttaaaacatcattgtggtgatcttgtttattctatctcactaaggatatccagtttcctaagctcttactggctagcaatttcgtcttaattttattgctaaatgttcaaattttgcttccaaactcactttatttttgcagatgtgtacatctgctaaatactaattttatgtaaatgattttgttgattatctttccacatcttaaaatgtttctaacagctttgagattttatctcaacaggctctctctgaccccaaagtagtacttaccttcgtgactactgacaaagtcacaaaatgcaggcgatgtcatgtatttcggtacaactaaatctaggaaacggttttttcattgcattactgcatattttcattttcatttaaattatgtcccctttttctcttgcttgaaacagtgctcctcgaactttgtcttccagcacattttaaagagaaccaattaaagaacaatcacacattctgcttattaaaggctatttaaaaagaaacattttgtattagaaaatggccaactttaaaacactattttttacactcataaaaatgttttttaaatcgccttgacaatcatcagcttttgaaatgtgaattcctattgccagagtaaaggtctcgtttttataccaacaaaaaaaaacaaaaaaaaaaaaaattgggggggggcgggcccgagagagttttcaaaacccatcgcgttggggcgcgacggccacaggtactgagacacgggcaatggggtcccaggacccgggacagaaagggggggttcccccaaaaaagccggggaacagggtctggacatcacagggtcggaggcaacaggctcacaggggccagagcgattaa

SEQ ID NO: 15 - DNA, 19267 bp, Homo sapien
ggtccaggcggcgcgcacggtatggcggcggcggcggcggcggcggcggcgcgcgcctgagaagaggggacgccagcccggtcaggcctcggcgcggcctacacgctccgctcgctcgctcgctcccgcctcccgccccgcgcccggccatggcggagccgtcgtccgcccgacgcccggtgcctctcatcgagtcggagctgtacttccttatcgcccggtacctatcggcgggcccgtgtcggagagcggcccaggtgctggtgcaggagctggagcagtaccagttgttgccgaagagattggactgggagggcaacgagcacaacaggagctacgaggagttggtcttgtccaataagcatgtggctcctgatcatcttttgcaaatctgccagcgcatcggtcctatgttggataaagaaattccacccagtatttcaagagtcacttctttacttggtgcaggaaggcagtctttgctacgtacagcaaaagactgcaggcacacagtttggaagggctctgcctttgctgctcttcatagaggaagacctcctgaaatgccagtgaattatggttccccaccaaatcttgtggagatacatcgaggaaaacaactcacagggtgttccacttttagtacagcatttccaggaactatgtatcagcatataaaaatgcacagaaggattctcggacatctatctgctgtttactgtgtagcatttgataggacaggacatagaatctttacaggttcagatgactgtttggtaaagatttggtcaacacataatggccgcttgttatctacattaagaggtcattctgcagaaatttcagatatggcagtaaactatgagaatacaatgattgctgcggggagctgtgataaaattattagagtgtggtgcttgagaacttgtgccccagttgctgtgctccaaggacacacaggatcaattacatctttacagtttagcccgatggccaaaggctctcaaagatacatggtttccactggtgctgatgggacagtttgcttttggcaatgggatttagaatccttaaaatttagcccacgtcccctgaagttcactgaaaagcctaggccaggcgttcaaatgctttgttcttcttttagtgttggtggtatgtttttagccacaggtagtactgatcatgtaatcagaatgtattttttgggttttgaagcacccgaaaaaatcgcagaacttgaaagccacactgataaagtagatagtatccaattttgtaacaatggtgatcggttcctaagtggtagcagagatggaacagcacggatttggagatttgagcagttagaatggaggagcattttattggatatggctaccagaatctcaggggacttatcttccgaagaggaaaggtttatgaaacctaaagtaacaatgatagcttggaatcaaaatgatagcattgttgtcacagctgtgaatgatcatgtcctcaaagtgtggaattcttacactggacaactgcttcataacttaatgggacatgctgatgaagtatttgttctggagacacatccctttgattccagaattatgttatctgcaggacatgatggcagcatatttatatgggatattacaaaaggtaccaagatgaaacattattttaatatgattgaaggacaaggacatggagctgtgtttgactgtaagttttcacaggatggacagcattttgcctgtacagattctcatgggcaccttctgatatttggttttggatgcagcaaaccatatgaaaagattcctgatcagatgttcttccatactgactatcgaccacttattagagattctaataattatgtcttagatgagcaaactcagcaggctcctcatcttatgcctccaccattcttggtagatgtagatggaaatcctcatccaaccaagtatcagagattagtaccaggccgagaaaattctgcagatgaacatttgattccacagctgggctatgtggcaacaagtgatggagaggtgattgaacaaattataagcctgcaaaccaatgataatgatgaacgcagcccagaatcgagtattcttgatggaatgataagacagttgcagcagcagcaagatcagagaatgggagcagatcaggatactattccaagaggactttcaaatggtgaagaaacaccccggagaggttttagaaggctgagcttagacattcagtcccctccaaatattggtctgcgtcgtagtggacaagttgaaggtgttcgtcagatgcatcaaaacgctccacgcagtcagattgctacagaacgtgacctgcaggcttggaaacgaagagtggttgtaccagaggtaccactaggcatatttaggaagctggaagacttccgattagagaaaggtgaagaggaaagaaatctttatataataggaagaaaaagaaagactcttcagctctcacataagtcggattcagtggttttggtatcacagtctagacaaaggacatgtaggcgtaaatatccaaattatggtagaagaaatcgtagctggcgtgagttatcttctggaaatgagtcttcaagctctgtaagacatgagacttcctgtgatcagagtgaaggttctggttcttcagaagaggatgaatggagaagtgacagaaaaagtgagagttacagcgaaagttcaagtgactcttcatctagatattccgattggacagctgatgcgggcatcaatttgcagcctcctttaagaacatcatgtcgtcgacgaattactcgattttgtagtagttcagaagatgaaatatctactgagaatttatctcctccaaaaagaagacgaaagagaaagaaagaaaataagcctaagaaggagaatttgcggaggatgactccagcagagcttgcaaatatggagcatttatatgaatttcaccctccagtttggattactgacaccacacttagaaaatctccttttgttcctcaaatgggtgatgaggtaatatattttcgacagggtcatgaagcttatattgaggctgtaagaagaaataatatttatgaactgaaccctaataaggagccatggagaaaaatggatcttagggatcaagaattggttaaaatagttggaatacgatatgaagttgggccccctacactctgttgcctaaaactagcatttatagatccagcaactggaaaacttatggacaaatctttctctattagatatcatgatatgccagatgttattgactttcttgtattgcgtcaattttatgatgaagcaagacagaggaattggcagtcttgtgacagattccgctctattattgatgatgcttggtggtttggaacagtgttaagtcaagagccatatcaaccacagtatcctgatagtcatttccagtgttatattgttaggtgggataatactgaaattgaaaaacttagcccatgggacatggaaccaattcctgataatgttgatccacctgaagaattaggagctagtatttctgtcacaacagatgagctagagaaattgctctataaaccacaagctggtgaatggggtcagaaatcaagagatgaagaatgtgatagaattatcagtggtatagatcaacttttgaatcttgatatagcagcagcttttgcaggccctgttgatttgtgtacatacccgaagtactgtactgtagtagcttatccaaccgatctttacacaattcgaatgagacttgttaatcgattttacaggaggctgtctgcgttagtttgggaagtcagatatatagaacataatgccagaacatttaacgaacctgagagtgtaattgcaagatcagctaaaaagataactgaccaacttttaaaatttatcaagaatcaacactgtacaaatatctcagaactttctaacacatctgaaaatgatgagcaaaatgctgaggatttggatgatagtgatcttcctaaaacatcttctggaagaaggagagtccatgatgggaaaaaaagcatcagagctacgaactatgttgaaagcaactggaagaaacagtgtaaggaactagtgaacttaatttttcagtgtgaagattctgaaccatttagacaacctgttgatttggttgaatatccagactacagagatattatagataccccaatggattttggaacagtaagggaaactctagatgcgggaaattatgacagccctttggagttttgcaaagacatccggctgatatttagcaatgcaaaagcgtatacaccaaacaaaagatcaaagatttatagtatgaccttgagattatctgccttatttgaagaaaaaatgaagaaaatctcttctgattttaaaattggtcaaaaattcaatgaaaaacttcgaagaagccagaggttcaagcaacggcaaaattgtaaaggtgacagtcagcctaacaaaagtatcagaaacctcaagccgaagaggttaaaatctcagacaaaaataattcctgagttggtaggttctcctacccagtctacctcaagtaggacagcttatcttggaacccacaagacaagtgctggtatctcttcaggtgttacttctggtgactcttcagattcagcagaatcatcagaaaggaggaaaagaaatagacctataacaaatggttctacattatctgaaagtgaagtggaagattctttagctacctctttgtcatcgtcagcttccagtagttctgaggaaagcaaagagagttccagagctcgtgaatcctcctcacgcagtgggctatccagaagcagcaatctcagggtaaccagaactagagctgctcaaagaaaaactggtcccgtttcattagcaaatggatgtggcagaaaagccactcgaaagagagtctatttaagtgattctgataacaattcattggagactggtgaaattctaaaagccagagctggaaataaccgaaaagtcttaaggaagtgtgctgctgtggctgccaataaaataaagctaatgagtgatgtagaagagaattctagctctgaaagtgtctgttctggtcggaagctgcctcaccgcaatgcttctgctgtagctagaaaaaagttattacataattctgaagatgaacagagcttaaagtcagaaattgaagaagaggagctaaaagatgaaaatcaacyattaccagtgtccagttctcacactgcccagagcaatgttgatgaatctgaaaacagagactcagagtcagaaagtgatttgcgggtagcccggaaaaattggcatgctaatggttacaagtcccatactccagcaccttcaaagacaaaatttcttaaaatagagtcttctgaggaagactctaaaagtcatgattcagatcatgcatgtaacagaactgctggcccatcaacgtctgtgcagaaacttaaggcagagagcatctcagaggaagcagattctgaaccaggaagatctggtggtaggaaatacaatacatttcacaagaatgcgagtttctttaaaaaaaccaagattctgagtgactcagaagactctgaatctgaagagcaagatagagaagatgggaaatgtcataaaatggaaatgaacccaatttcaggaaatctgaactgtgaccctattgctatgtcccagtgttcctcagatcatggatgtgaaactgatttagattcagatgatgacaaaatagaaaaaccaaacaattttatgaaagattctgcatcacaagacaatggactaagcagaaaaatttccaggaaaagggtctgttccagtgactcagacagtagtttacaggtggttaagaaatcatcaaaagccagaacaggtctcctgaggattactcgaagatgtgcagctacggctgccaataagatcaagctcatgagtgatgtagaagatgtcagtttagaaaatgtgcacactagaagcaaaaatggaaggaaaaaacctctccatcttgcttgtactacagctaagaagaaattgagtgattgtgaaggaagtgtacattgtgaagtaccaagtgaacagtatgcctgtgaaggcaagccacctgatcctgactccgaaggtagtacaaaagtgcttagtcaggctctaaatggagactcagactctgaagatatgttgaattcagaacacaagcacaggcataccaatattcacaaaatagatgcaccttctaaaagaaaaagttcctctgttacatcttcaggagaagattcaaaaagtcatattccagggagtgagactgataggacattttcttcagagtcaaccttggcacaaaaagctactgcagagaataattttgaagtggaactgaattatgggctgcgcaggtggaatggcagaagactcaggacctatggaaaggctccttttagtaagacaaaagtgattcatgattcacaggaaacagcagagaaggaagtaaaaaggaagagatcgcatcctgaattggaaaatgtgaaaatctctgaaacaactgggaattcaaagtttagacctgatactagttccaaatcatcagatttgggatctgtaactgaatcagatattgactgtactgataatacaaaaaccaaaaggaggaaaacgaaaggaaaagcaaaagtagttagaaaaggtaaaacttttacagctaacatatctaaaactgtgagacgtcaaagacaaagcaaacgccctaggttaagtgtggatgataatgactgggaggatttggactatgcaaaatctaaaagagttcttcgacgttcaaaaataaaaacgagaaatcagggtagaaggactgtgagataccatgatggggatgatgacagaagtttagaaaatgtgttagatttcaatggttgcaccttatgaccttgagggaaagccagttcatttaagaggaaatggactggcatttatggtgaaagctggctgttaaaattatttttttgtcttacaattcagggaatatatttatatttttctatgaaaagttatgaatgtgactaaatcatgactgttatttttatttgcacttgctggtctttgtagcagcattcagcacaggtgccaaaatatgcttcattttgggggcagatctattttgacagtatttgactacatatagcaagagtttgaaatatgttaaacactagacatcctggttatcaaaaccaatgagcattactttcatggcagcaagtgtcatgcagttattttctgaatttgtcaaagaggcagtagtttctaacccctgttctatagtagttacaacaatttcacaacctatgtttacagattcttcataaatacatgcatactgacactataatcatgggaggtgtaaccatgattagtaggcgaggtacctaccactttttttttttcttcccctggctacttgagtagaatgcattataccagatctggtcactttcattgaaatggtttctaattttcttcccaagtgctgttgggtttttttcttcttaaggaaaacgttgtcacttttatgttataaacttgaatttataaagtgctggtaaattatttttaatgatttgagtgcatgttttaaacctctaggaccagagcatagtcagagcattttcttttaaattgtgcactaacaaaatgctatataatctgtcttctgtccaagatctcctggtttccattgtaagggatttaaccaaaatcttgctcttccataatcttactctgtgaaatagaggaattcgtgtgccttagatttagaagtgtgttctttaatagagtgtacagggctaaaagagtatttaagttaatatgtaggtttcccccatctgtattccaattgtagaggtgagttttgttaagagtacaattgcaaatcttatctatataggaaaatagctaaatgtcattctccatctctttgttttagtttactgcttccatgtgcaatcctaagcattctttgctggggcaactaaatgtatctttattagtgacttctagtccaaatataagaaactgtcatgttttgtgggaaaataattttataatccatttaaagtgaaagtttatcacacaaatagtacacttattttctaaccaaatacttgataggttatgctactccagtgtagatggccattcctaacttgtttgtgcctgaagatggacttgattcaaatggtttacatatttagtgggtaagggatatgttacagtaccccacctgtaagttatttattagccctaattgtgtttgatttcagacaaaattaacccttttctcctgtgtatctttgaagtggcagataaggtgaagcatcagactggtatcaatattagacaatgttatttattagccctaattgtgtttggtttcagacaaaaccttttctcctgtgtatctttgaagtggcagacaaggcgaacatcagactggtattaatgttagagaatgttctgaagtgttcctattttgtagttatctattccatttgacatagtagaaggtacattttctttctactctgatgcatggggaaggatgtttttggacattatcaactgagataggtgggaaacctcctctcatttgtggcttagagagctatcaccatttcagaactatgatgcttttcttctcagaacttgtgttaagtagatagtaaacagattgattcatgataattgtccttgactaagactgaaaagactaatgggatgccttttactttgctaattttaaaaactggtgatagatgtcaaatccattaatttatttaaactcttcttaaccttctcttttataatctgttctcaggttttaactccatgtttaccatcatttgcaaaaaggtaccaaaaaaatccataaataaatatggaatacattcataagtacatacattcttttggtataaaacaatattttgacagtttaggcttcattaatagaactattctgattatttggactgcattaattggtcattgactggccatccaattaccattttttctttcagtccaaaatagttagacccttgcatacagaagtggtattttggtttttaatcagatttggtttcatcagaagcagcaagaatggacctgatgtctttaaaagcatagccgacaatggtagcttctcaagttatgaaataaaactgagagataatggagaaaataatttttatgggtttttttggttatggtgctattcctaaggttaactttgaatatgtgacacacacactcctaagtacctttaaggaaaattaataaatcattaatagttaaaatgtttacattgagcactagaacatgtttggccttttttttctacgttatgcaaaatgcccagggatttaatgcacaggtgtactttaatgtttagggtcagtttgtagtattcttgagaaaaagataaagggttataatttgaatgtgaactgatccagaaataagtgctgtacctttccactgcacttgaagttcaacttaatggtgtatgtgaaaaacaaaaactactttggttgtgtatgtccaaagtcctatggttttattcatttatggttttacaggctttgaagtactcagatttgatttttgctttcttggaaagactcactttaccaagcatataaaggaaaaatgatttcaaacattgacaagatagatgagtgttaacaaagctttcttttttcgtgtcctccttatttaaaaaggtatacttacaatgtgaagtaacttatgaataaaaggaaaagtttatcccatattcaaataattcctaaggtcagcctccctttttgtaagtggcaaatatctgattaaatcatttctcagtttattaatccttggaaacaatgatatagcagttactcacagcttgtaaattacaacagaaaggttcctttcaaatagtagagctgcacctaaagaggaaattgggtttataagaaaatggaggcaaagaacttaagttttaagaaaaagcacttcaaaacagaagggcaaatggaaaaggggaatataaaacaaaccaataaaaataccatctgagggtgttactgtccaaaagtaaagaataagatgcatcactaagccctttgcactcgttatgacctcgtaagtaaaaattatcacttagaataaggggtgcacactacattccctctgtcttctagacttttttttttgtagaagaatcagaaaacaatttactaacctccctgtttgatattaaaaataggaagaattttaatattttctgttagtacaagttgaacttgattgtgccaactgaaaccccagaggtttgtatatcagtagaatgcaagaacattgttaaaggtgcttacgatcttttttgttttcctttccactccattgtatcaattttttgagtaacttttaaatggctagaaaatggtctttttgctttgcccttttaaagctgaaataaccagctccattcttttcatgaatagtaagttgatatatttatttatcaggtatcttgcagttgtcaccaaatactgtagttttcttatgttgtatggaaattatagttcaattattttaatgtgatggagtgcaacaagtcattgtagaacttttcacctgttaatgttgaagttatacctctgaatttctgctgtggatatcaaggaaataataaagcagaaaccccaagaaatttgcaacttaacagtttgagactgtctcttatcctagtatttgggaagagaaggaataaatttgtcaaaactaggtgagaaaatagagcattgtgggaaaaactgagtccaactagattagcaaatgttaattcctagctcaaactgtgaatagtaaggattgtaaagtatgtaatgctaagggctgtgttgtcttttcttacgattttaagttttaaaggctgttaaattacagagatgttgcccaaggatacatggggattctcaaaagtaagagatttttacctttttcataatctgccaagctggttcctaatatattgttaaattggtagaaaaatatctttaaattggtgtctgctcaagaattgcttttctagatttgatggagggagggggagagtcacatcatttggattctaccaatctgcaggctctatctttggcaacatgtaaataattagactatacatctgtttctcaagtatggcaagaccaatagtttgaatttaattatcaatgctatggtatactttctggtcatattttagttatgtcagttttaaggtaagttttttcatttattaaagcccttaaatgagattttagactgccaaagagaagaggcagtccaattgacctaactgaaatgagatgaccagtatatagagcctagatggactgtagcagctctacccctttgttttacaaggtaaatcattttaaaaattaccttttttgatcagtgggtaaaagttaaagggatctttaatttttgatatattcaagttaattttctaaatgtgaatcagtccttggactgcaactatatattcacctacaaaatcccaatcaaaaaattacatgagcctgtcaagcagatctttagttttccacttcacataagatcgttaatgttctaaattaatctattcatttagatgatttttgtcagttcttaaatgggatataataaatttagcattttcatcttaacaagcaaaagagttaaaaaacaaaacaaaacactactccaagccaaatacattctagctggttaattccagacttgtcccaagtggttccccaacctcttttccactggtaatttcttttcatgcaggcagaatataggggtgcgagcgctgtgagttttacatatgagcttggataggggaactgaagcgagtcaggagccctgctggaaaaggggtttgccattggattgtctgtggcctggtttctttccagtagtacagtaatagggtagattgaaaacaagtatttacttctgattctgcctgcatttagtgtgaaatgctcttaaggtattgcttctaaaaagcaaattaagcagttaagtataaagtccctgaattcatatttcaaaataaggcttttatgagatttttattaaaaattgcaatagccatcacaaatctgagtttttctaggggtgagagaaaactgtattgtgatgagctagattagttgtagttccagaataagaacaaaaattcagagttgtgtggtgcccatcattgagtaaatgaaccctaaaaatgaataagctaatgaactagttcatggaattatttctgatggtcttttgacctgatgctgccatactgcagtgttaccagctccccctagaaaacggaactgtttaaaaacacagcaagttacagaaaccattttattctacagccattggggtacttcagtttatgggatgtttttggaaacttctgctttgggagggatgaagatcattgataaatgttatttgctttctgagttttggggtcatttcattgcttatcaatgaagggcagacagaggagagaatatctcaagtcttttctgataaaaggcttgcttgagggagcttataacttgcacctagagggtttacccactttgtggatttgatttatccaccaaccacagcaaccaataatgtcaagattctaggagtttatgaaagaggctagtatgttttcattttgagtcagacattcttttctcattctcaaatctgttttaaatgctccaattttaaaaatgccaatgaaaattttataatgcttctgtagtaaccatatgcagtttactttgaatttaggaaaacagttttgtatgatgaaatattgtgcagaatctgtaaataaggtagcttaaaaaaaaaaaaaaagtctaattagaatatgattaatccttaaaatgtagaaactagagattgtgttgagtcagaactgttatgtttgtatccaggtttctattcaccacatataccatcttagaatacacacatatctgtgagttataatttaaagtggtcatccagggaaatgatcatggagtgctactacagatgtacagttttacactactgatgtgttcttgccatacccaagtagggaatcacttccaggaaaacaagtcctcaagcactcaatgactttgtaaacccatgactgaaacaagactcatctgaggcagtaggactggtgggattctactgacttcttagtatcacatggcaccatcacaaatgcattgttagagcagcaacatccagagttcttaagcttgtaccctaacacacaaatttgacttctaaccctgaaatatcctatatatatttctaaaactgtttgtagttttcttgagaaaaagcactttataatttactcagttttcagtaataaaattaacactgacttgaatgtatttaaaaaaattctccacagttttgtcttcctcagattgtttttatccttattctctgaaattcctgttttattgtctaagacttaagagattcagctttatcaagttagagtacagtgtaattcaaattctccctcccttgggcatagttactgaagttcaaatttccttaagtattttttaaaaacctgattttagttttttttttcctgcagaatcttaacttttccattattctggatgacaaataaacatttattaaaatgtgttagaattagtatttactaggttcctaaattgtcagtataggtactttgatcacacatcaaaatggaatttctgcaacttaaagcattttgttacaaattgtagttgaaatagaattttatctatttgtctggatgaataggttgttgggaatgaaccagttatctgttcttttcttccaaatgcaaatggtgcagctagttgataatagtatattctcatcctactataaagtgcaaatttcaccttaattttgcatattttaaaatttttgtttaccctttgtagcatatttacattttagcatttgctaacattgatttaatgtgttaaagattcattttggatatagggttgacttgttggagatactagttcataattttaaaattcccaagagaagtgtctttgaagtggtaaacacagtgcactttaagccacttctcttcccacagagtccagctgaaggaggtaagggcatgctgcatgagagtaatgccgtgatgagtgtcttactctggtaaaatgccatttacaatgcctggagactgaacactgaacaaaacatagtgcccttagaatttcactggaaaaacatgtgaatcacataagttagttggcaaaaggaactgatgtgtatgtggtggggttgctttgaataaagtatttcctaacctattctggggagaacgctcaactgatcttagagaagtgtgaaatcagtttcatagacttagggaaaaatctgaagtgcttgcactgtgagggcagaggcctgcctcattagtctagctgtatgaacatgtcagtccacagaagcagtttttacctgtactcatctgcccttcagtcagctttgtgacagaagggcaaacatcttcacagaagaaaaagttcagaaggttggcattggtggtttcattgctacagaataatagtgttacttgatagtatctgactaaaagagctctcattttctagtacttagtagtaaaaagaatgtggtggagtcctccagatgtctagtgtgggtggaggatatcaactggttatttcagtgatctacagccttaccttttgaatgctaaatgtctggaaacttcaggcagggtcctacaaaacaaactgccatcaagattggtgtgtaccatgaaggcagttttagatagtttgactgttcatggctgcaagaaagacctaaaattcaagggcccgtgaacttcagatacgtaaaaggaatatcacttctgttctagaagagtactaattagacttgtttgtgaaatttgaaaatttggctttgagacactggtaacaaacatatctgagccctcctaagtttggtcagcacggagtagtagctctggcatcatgtggctgtgtagagctccagtgtgatttcaagccccctctaaaaactgccttagtctgcatgaagtagttaactctccaaagtgctttttgtctggcaaatcccttcacaattttcacctctcgtctaaaagcttccttaaaggaagccttccttgatcccttaggctaggttaggtttccagtctgtgttctcatagcactctgcactttttggttccttaaagcaactctgtgttattttttagaattttaatctgaatctcgtgtgtcacatacctaggtcagaaaatactggaacaatgaagttaagatttagtaattcaaattatgtaaaatgctcatatatatgtttttagattagcagctttatgatgccgatgctgaaggaacttttcaccccattcttacaagtctgctactgttttaagtgacatccttatagttgtagataagcaaatgtaaggttatatcaatgtgaagaagcccttagtatcacattttaaaatttatcatttagcaatatgacttttaaatttattgtttccgaatgagtgttgttgaggaatgttagcagtagtaaaatcttgtgttacaagatttttgcatttacatgaactttcactcatttttcagaatttgttcctagagacagagaacccaatacaaaagtgagaacatgtatgcataatcagaaggatgcagtgcagatgcctagtgaaactctgaaagcaaaaatggtacctgagaaagttccccgcagatgtgctactgttgctgcaaataaaataaagataatgagtaatctaaaagaaacgatctcaggaccagaaaatgtctggattaggaagagtagcagaaaactgccccatcgaaatgcttctgctgcggctaagaaaaaattactgaatgtttataaagaggatgatacaaccataaattctgaaagtgaaaaagagctagaagatattaatagaaaaatgctttttttaagggggttcagatcctggaaagaaaatgcacaatagtgactatgagaatgtagaagtggcatctgaaaacaattggtacacaagtaaactggcagttacattctgctcccagctctaaaattactcccttattggcatctttggaggaattttctaaaagccataatccagtgggttcctcccagtcagctcttgtacagacatgtgctctggggaattctgaggaggaaataaattgcagagtctgtaggtggagaggtggaaagaaaagacaaatggcctgctataagactactattcctttccagaatgcaaggccttgaagacatgattccttagaggaagaatataatgggaagtgtacaggctaggaagaacttgaagtgaacaaatttcaaaatcttaacctgatgctaattttcagggttctccattacagtgtaaaaattcagaccacgacaactatggtgtcatgaggaaaaaaaatcaggcatttttccaaaggaagtgctaatgggcctatttgacttctgagtgaagcaaaaactacccagatccattccctacaattcacatccccaaaggtcaaaaacaaactaggaggacctgggaatttcagctggagatactgattattgagttctgaagtagagtgttggaaataggcaattagagaaagtccattgatgtcattttgtttataatattgcagttcatactgaatgaccacttgatatgactaattcagggaatatatatttttctatgaaagctatgaatgttactatcacggcttttccttatttttacttgtatgtagcagcatttacagaaatgccaaaaatgtgcctcattaagaggcaggtcttaatcagttagataaaaataaaatgtatagcttaagatcaaaacagtcatatttttagatacagtgaaatcttttatgtttctctacagcaccttaaaaattagaacttgaatactttgagtaaacttactacaatctcatcccaacaaactttaatggtagcatgtttggcctatttcattgtggcctgtactaggattagaaaatttggtcgtggtataacaaagaagtgtatttacaataggatttaatttgttgttaatatgtatttgttgaaattaaaattgccagattaaatgaatatactgtcgcatctttttaacatagtaacgtgttactggaaaaattaagttgttgaaagtaagttgttttcccatttaaaaatatctgaatatatgatttgcatgtgtaaatctgaaaaactaaactacagaaacctagggttttctatttcttttttaagtcaaatgcatttttttttttgttatacagatgaaccaagtgtctaaaatacttgagaaatttgtggttgcatgtctgttttaaaaaaaaggctttttgttttttagcataagccagaatattctaacctactaagtctgtgtcctttgctccttttgtagtatactttcatctaaattactgatcccaatatgttgatacacaggtgagaaggaagaattcctaataaactgctattacttttaggtgcatggggtttgatttttgagctctaatgaaatgcttaaacttctttccagttcaaattttacacttaatttataatatttattgagtatattatgtcctcaacaagtaactataaaatgaaatacttaactcggtgaagactattttatgcaaagtttttttttttttttttttttttttttagcaatttcagtgtaatgaaagaatttaagctttgaatttataatttgctgtggtggggttaatttctgtcagtatttgagattgtattatcagtcttgcataatgaaatccttttttggctaagtatttaattcgaacatatttgcctttttaaaaagtgcttggcctaaacttattgtaactgcatgaaataagcatttgcttaaaacttaacattgtaaaattgttctctctgaaatgtgtgcagaatttaaatcatggccaaatgtattactattaccctatttacagtaatttgctttgcagaaaatatttcttcatcatggaactgtgaaatcaaattgaagatcttactggtaaaaatgacaaattaacaaaaggactaagacaagtggtgcccaaacaacctttttattctgcagttccatcatcataatagaccagttaacccaggagtcctaatgttttaaaacatcattgtggtgatcttgtttattctatctcactaaggatatccagtttcctaagctcttactggctagcaatttcgtcttaattttattgctaaatgttcaaattttgcttccaaactcactttatttttgcagatgtgtacatctgctaaatactaattttatgtaaatgattttgttgattatctttccacatcttaaaatgtttctaacagctttgagattttatctcaacaggctctctctgaccccaaagtagtacttaccttcgtgactactgacaaagtcacaaaatgcaggcgatgtcatgtatttcggtacaactaaatctaggaaacggttttttcattgcattactgcatattttcattttcatttaaattatgtcccctttttctcttgcttgaaacagtgctcctcgaactttgtcttccagcacattttaaagagaaccaattaaagaacaatcacacattctgcttattaaaggctatttaaaaagaaacattttgtattagaaaatggccaactttaaaacactattttttacactcataaaaatgttttttaaatcgccttgacaatcatcagcttttgaaatgtgaattcctattgccagagtaaaggtctcgtttttataccaccacgaagcgctgtatttcttgctgcccttgcgtccgcccgtgcccgctgtctgagggcgcgcctggctacgggggccctcagtaccaccgcgccgccacctacctgggcagtcgaaatttggagcgggtgctcagtacactaatgctaccccagtctctcctaacgcagaaggaaaatggaaacggacgatgaggggacggccccacagctcccggacgccacggccagcggcgctggc

SEQ ID NO: 16 - DNA, 18795 bp, Homo sapien
ggtccaggcggcgcgcacggtatggcggcggcggcggcggcggcggcggcgcgcgcctgagaagaggggacgccagcccggtcaggcctcggcgcggcctacacgctccgctcgctcgctcgctcccgcctcccgccccgcgcccggccatggcggagccgtcgtccgcccgacgcccggtgcctctcatcgagtcggagctgtacttccttatcgcccggtacctatcggcgggcccgtgtcggagagcggcccaggtgctggtgcaggagctggagcagtaccagttgttgccgaagagattggactgggagggcaacgagcacaacaggagctacgaggagttggtcttgtccaataagcatgtggctcctgatcatcttttgcaaatctgccagcgcatcggtcctatgttggataaagaaattccacccagtatttcaagagtcacttctttacttggtgcaggaaggcagtctttgctacgtacagcaaaagactgcaggcacacagtttggaagggctctgcctttgctgctcttcatagaggaagacctcctgaaatgccagtgaattatggttccccaccaaatcttgtggagatacatcgaggaaaacaactcacagggtgttccacttttagtacagcatttccaggaactatgtatcagcatataaaaatgcacagaaggattctcggacatctatctgctgtttactgtgtagcatttgataggacaggacatagaatctttacaggttcagatgactgtttggtaaagatttggtcaacacataatggccgcttgttatctacattaagaggtcattctgcagaaatttcagatatggcagtaaactatgagaatacaatgattgctgcggggagctgtgataaaattattagagtgtggtgcttgagaacttgtgccccagttgctgtgctccaaggacacacaggatcaattacatctttacagtttagcccgatggccaaaggctctcaaagatacatggtttccactggtgctgatgggacagtttgcttttggcaatgggatttagaatccttaaaatttagcccacgtcccctgaagttcactgaaaagcctaggccaggcgttcaaatgctttgttcttcttttagtgttggtggtatgtttttagccacaggtagtactgatcatgtaatcagaatgtattttttgggttttgaagcacccgaaaaaatcgcagaacttgaaagccacactgataaagtagatagtatccaattttgtaacaatggtgatcggttcctaagtggtagcagagatggaacagcacggatttggagatttgagcagttagaatggaggagcattttattggatatggctaccagaatctcaggggacttatcttccgaagaggaaaggtttatgaaacctaaagtaacaatgatagcttggaatcaaaatgatagcattgttgtcacagctgtgaatgatcatgtcctcaaagtgtggaattcttacactggacaactgcttcataacttaatgggacatgctgatgaagtatttgttctggagacacatccctttgattccagaattatgttatctgcaggacatgatggcagcatatttatatgggatattacaaaaggtaccaagatgaaacattattttaatatgattgaaggacaaggacatggagctgtgtttgactgtaagttttcacaggatggacagcattttgcctgtacagattctcatgggcaccttctgatatttggttttggatgcagcaaaccatatgaaaagattcctgatcagatgttcttccatactgactatcgaccacttattagagattctaataattatgtcttagatgagcaaactcagcaggctcctcatcttatgcctccaccattcttggtagatgtagatggaaatcctcatccaaccaagtatcagagattagtaccaggccgagaaaattctgcagatgaacatttgattccacagctgggctatgtggcaacaagtgatggagaggtgattgaacaaattataagcctgcaaaccaatgataatgatgaacgcagcccagaatcgagtattcttgatggaatgataagacagttgcagcagcagcaagatcagagaatgggagcagatcaggatactattccaagaggactttcaaatggtgaagaaacaccccggagaggttttagaaggctgagcttagacattcagtcccctccaaatattggtctgcgtcgtagtggacaagttgaaggtgttcgtcagatgcatcaaaacgctccacgcagtcagattgctacagaacgtgacctgcaggcttggaaacgaagagtggttgtaccagaggtaccactaggcatatttaggaagctggaagacttccgattagagaaaggtgaagaggaaagaaatctttatataataggaagaaaaagaaagactcttcagctctcacataagtcggattcagtggttttggtatcacagtctagacaaaggacatgtaggcgtaaatatccaaattatggtagaagaaatcgtagctggcgtgagttatcttctggaaatgagtcttcaagctctgtaagacatgagacttcctgtgatcagagtgaaggttctggttcttcagaagaggatgaatggagaagtgacagaaaaagtgagagttacagcgaaagttcaagtgactcttcatctagatattccgattggacagctgatgcgggcatcaatttgcagcctcctttaagaacatcatgtcgtcgacgaattactcgattttgtagtagttcagaagatgaaatatctactgagaatttatctcctccaaaaagaagacgaaagagaaagaaagaaaataagcctaagaaggagaatttgcggaggatgactccagcagagcttgcaaatatggagcatttatatgaatttcaccctccagtttggattactgacaccacacttagaaaatctccttttgttcctcaaatgggtgatgaggtaatatattttcgacagggtcatgaagcttatattgaggctgtaagaagaaataatatttatgaactgaaccctaataaggagccatggagaaaaatggatcttagggatcaagaattggttaaaatagttggaatacgatatgaagttgggccccctacactctgttgcctaaaactagcatttatagatccagcaactggaaaacttatggacaaatctttctctattagatatcatgatatgccagatgttattgactttcttgtattgcgtcaattttatgatgaagcaagacagaggaattggcagtcttgtgacagattccgctctattattgatgatgcttggtggtttggaacagtgttaagtcaagagccatatcaaccacagtatcctgatagtcatttccagtgttatattgttaggtgggataatactgaaattgaaaaacttagcccatgggacatggaaccaattcctgataatgttgatccacctgaagaattaggagctagtatttctgtcacaacagatgagctagagaaattgctctataaaccacaagctggtgaatggggtcagaaatcaagagatgaagaatgtgatagaattatcagtggtatagatcaacttttgaatcttgatatagcagcagcttttgcaggccctgttgatttgtgtacatacccgaagtactgtactgtagtagcttatccaaccgatctttacacaattcgaatgagacttgttaatcgattttacaggaggctgtctgcgttagtttgggaagtcagatatatagaacataatgccagaacatttaacgaacctgagagtgtaattgcaagatcagctaaaaagataactgaccaacttttaaaatttatcaagaatcaacactgtacaaatatctcagaactttctaacacatctgaaaatgatgagcaaaatgctgaggatttggatgatagtgatcttcctaaaacatcttctggaagaaggagagtccatgatgggaaaaaaagcatcagagctacgaactatgttgaaagcaactggaagaaacagtgtaaggaactagtgaacttaatttttcagtgtgaagattctgaaccatttagacaacctgttgatttggttgaatatccagactacagagatattatagataccccaatggattttggaacagtaagggaaactctagatgcgggaaattatgacagccctttggagttttgcaaagacatccggctgatatttagcaatgcaaaagcgtatacaccaaacaaaagatcaaagatttatagtatgaccttgagattatctgccttatttgaagaaaaaatgaagaaaatctcttctgattttaaaattggtcaaaaattcaatgaaaaacttcgaagaagccagaggttcaagcaacggcaaaattgtaaaggtgacagtcagcctaacaaaagtatcagaaacctcaagccgaagaggttaaaatctcagacaaaaataattcctgagttggtaggttctcctacccagtctacctcaagtaggacagcttatcttggaacccacaagacaagtgctggtatctcttcaggtgttacttctggtgactcttcagattcagcagaatcatcagaaaggaggaaaagaaatagacctataacaaatggttctacattatctgaaagtgaagtggaagattctttagctacctctttgtcatcgtcagcttccagtagttctgaggaaagcaaagagagttccagagctcgtgaatcctcctcacgcagtgggctatccagaagcagcaatctcagggtaaccagaactagagctgctcaaagaaaaactggtcccgtttcattagcaaatggatgtggcagaaaagccactcgaaagagagtctatttaagtgattctgataacaattcattggagactggtgaaattctaaaagccagagctggaaataaccgaaaagtcttaaggaagtgtgctgctgtggctgccaataaaataaagctaatgagtgatgtagaagagaattctagctctgaaagtgtctgttctggtcggaagctgcctcaccgcaatgcttctgctgtagctagaaaaaagttattacataattctgaagatgaacagagcttaaagtcagaaattgaagaagaggagctaaaagatgaaaatcaacyattaccagtgtccagttctcacactgcccagagcaatgttgatgaatctgaaaacagagactcagagtcagaaagtgatttgcgggtagcccggaaaaattggcatgctaatggttacaagtcccatactccagcaccttcaaagacaaaatttcttaaaatagagtcttctgaggaagactctaaaagtcatgattcagatcatgcatgtaacagaactgctggcccatcaacgtctgtgcagaaacttaaggcagagagcatctcagaggaagcagattctgaaccaggaagatctggtggtaggaaatacaatacatttcacaagaatgcgagtttctttaaaaaaaccaagattctgagtgactcagaagactctgaatctgaagagcaagatagagaagatgggaaatgtcataaaatggaaatgaacccaatttcaggaaatctgaactgtgaccctattgctatgtcccagtgttcctcagatcatggatgtgaaactgatttagattcagatgatgacaaaatagaaaaaccaaacaattttatgaaagattctgcatcacaagacaatggactaagcagaaaaatttccaggaaaagggtctgttccagtgactcagacagtagtttacaggtggttaagaaatcatcaaaagccagaacaggtctcctgaggattactcgaagatgtgcagctacggctgccaataagatcaagctcatgagtgatgtagaagatgtcagtttagaaaatgtgcacactagaagcaaaaatggaaggaaaaaacctctccatcttgcttgtactacagctaagaagaaattgagtgattgtgaaggaagtgtacattgtgaagtaccaagtgaacagtatgcctgtgaaggcaagccacctgatcctgactccgaaggtagtacaaaagtgcttagtcaggctctaaatggagactcagactctgaagatatgttgaattcagaacacaagcacaggcataccaatattcacaaaatagatgcaccttctaaaagaaaaagttcctctgttacatcttcaggagaagattcaaaaagtcatattccagggagtgagactgataggacattttcttcagagtcaaccttggcacaaaaagctactgcagagaataattttgaagtggaactgaattatgggctgcgcaggtggaatggcagaagactcaggacctatggaaaggctccttttagtaagacaaaagtgattcatgattcacaggaaacagcagagaaggaagtaaaaaggaagagatcgcatcctgaattggaaaatgtgaaaatctctgaaacaactgggaattcaaagtttagacctgatactagttccaaatcatcagatttgggatctgtaactgaatcagatattgactgtactgataatacaaaaaccaaaaggaggaaaacgaaaggaaaagcaaaagtagttagaaaaggtaaaacttttacagctaacatatctaaaactgtgagacgtcaaagacaaagcaaacgccctaggttaagtgtggatgataatgactgggaggatttggactatgcaaaatctaaaagagttcttcgacgttcaaaaataaaaacgagaaatcagggtagaaggactgtgagataccatgatggggatgatgacagaagtttagaaaatgtgttagatttcaatggttgcaccttatgaccttgagggaaagccagttcatttaagaggaaatggactggcatttatggtgaaagctggctgttaaaattatttttttgtcttacaattcagggaatatatttatatttttctatgaaaagttatgaatgtgactaaatcatgactgttatttttatttgcacttgctggtctttgtagcagcattcagcacaggtgccaaaatatgcttcattttgggggcagatctattttgacagtatttgactacatatagcaagagtttgaaatatgttaaacactagacatcctggttatcaaaaccaatgagcattactttcatggcagcaagtgtcatgcagttattttctgaatttgtcaaagaggcagtagtttctaacccctgttctatagtagttacaacaatttcacaacctatgtttacagattcttcataaatacatgcatactgacactataatcatgggaggtgtaaccatgattagtaggcgaggtacctaccactttttttttttcttcccctggctacttgagtagaatgcattataccagatctggtcactttcattgaaatggtttctaattttcttcccaagtgctgttgggtttttttcttcttaaggaaaacgttgtcacttttatgttataaacttgaatttataaagtgctggtaaattatttttaatgatttgagtgcatgttttaaacctctaggaccagagcatagtcagagcattttcttttaaattgtgcactaacaaaatgctatataatctgtcttctgtccaagatctcctggtttccattgtaagggatttaaccaaaatcttgctcttccataatcttactctgtgaaatagaggaattcgtgtgccttagatttagaagtgtgttctttaatagagtgtacagggctaaaagagtatttaagttaatatgtaggtttcccccatctgtattccaattgtagaggtgagttttgttaagagtacaattgcaaatcttatctatataggaaaatagctaaatgtcattctccatctctttgttttagtttactgcttccatgtgcaatcctaagcattctttgctggggcaactaaatgtatctttattagtgacttctagtccaaatataagaaactgtcatgttttgtgggaaaataattttataatccatttaaagtgaaagtttatcacacaaatagtacacttattttctaaccaaatacttgataggttatgctactccagtgtagatggccattcctaacttgtttgtgcctgaagatggacttgattcaaatggtttacatatttagtgggtaagggatatgttacagtaccccacctgtaagttatttattagccctaattgtgtttgatttcagacaaaattaacccttttctcctgtgtatctttgaagtggcagataaggtgaagcatcagactggtatcaatattagacaatgttatttattagccctaattgtgtttggtttcagacaaaaccttttctcctgtgtatctttgaagtggcagacaaggcgaacatcagactggtattaatgttagagaatgttctgaagtgttcctattttgtagttatctattccatttgacatagtagaaggtacattttctttctactctgatgcatggggaaggatgtttttggacattatcaactgagataggtgggaaacctcctctcatttgtggcttagagagctatcaccatttcagaactatgatgcttttcttctcagaacttgtgttaagtagatagtaaacagattgattcatgataattgtccttgactaagactgaaaagactaatgggatgccttttactttgctaattttaaaaactggtgatagatgtcaaatccattaatttatttaaactcttcttaaccttctcttttataatctgttctcaggttttaactccatgtttaccatcatttgcaaaaaggtaccaaaaaaatccataaataaatatggaatacattcataagtacatacattcttttggtataaaacaatattttgacagtttaggcttcattaatagaactattctgattatttggactgcattaattggtcattgactggccatccaattaccattttttctttcagtccaaaatagttagacccttgcatacagaagtggtattttggtttttaatcagatttggtttcatcagaagcagcaagaatggacctgatgtctttaaaagcatagccgacaatggtagcttctcaagttatgaaataaaactgagagataatggagaaaataatttttatgggtttttttggttatggtgctattcctaaggttaactttgaatatgtgacacacacactcctaagtacctttaaggaaaattaataaatcattaatagttaaaatgtttacattgagcactagaacatgtttggccttttttttctacgttatgcaaaatgcccagggatttaatgcacaggtgtactttaatgtttagggtcagtttgtagtattcttgagaaaaagataaagggttataatttgaatgtgaactgatccagaaataagtgctgtacctttccactgcacttgaagttcaacttaatggtgtatgtgaaaaacaaaaactactttggttgtgtatgtccaaagtcctatggttttattcatttatggttttacaggctttgaagtactcagatttgatttttgctttcttggaaagactcactttaccaagcatataaaggaaaaatgatttcaaacattgacaagatagatgagtgttaacaaagctttcttttttcgtgtcctccttatttaaaaaggtatacttacaatgtgaagtaacttatgaataaaaggaaaagtttatcccatattcaaataattcctaaggtcagcctccctttttgtaagtggcaaatatctgattaaatcatttctcagtttattaatccttggaaacaatgatatagcagttactcacagcttgtaaattacaacagaaaggttcctttcaaatagtagagctgcacctaaagaggaaattgggtttataagaaaatggaggcaaagaacttaagttttaagaaaaagcacttcaaaacagaagggcaaatggaaaaggggaatataaaacaaaccaataaaaataccatctgagggtgttactgtccaaaagtaaagaataagatgcatcactaagccctttgcactcgttatgacctcgtaagtaaaaattatcacttagaataaggggtgcacactacattccctctgtcttctagacttttttttttgtagaagaatcagaaaacaatttactaacctccctgtttgatattaaaaataggaagaattttaatattttctgttagtacaagttgaacttgattgtgccaactgaaaccccagaggtttgtatatcagtagaatgcaagaacattgttaaaggtgcttacgatcttttttgttttcctttccactccattgtatcaattttttgagtaacttttaaatggctagaaaatggtctttttgctttgcccttttaaagctgaaataaccagctccattcttttcatgaatagtaagttgatatatttatttatcaggtatcttgcagttgtcaccaaatactgtagttttcttatgttgtatggaaattatagttcaattattttaatgtgatggagtgcaacaagtcattgtagaacttttcacctgttaatgttgaagttatacctctgaatttctgctgtggatatcaaggaaataataaagcagaaaccccaagaaatttgcaacttaacagtttgagactgtctcttatcctagtatttgggaagagaaggaataaatttgtcaaaactaggtgagaaaatagagcattgtgggaaaaactgagtccaactagattagcaaatgttaattcctagctcaaactgtgaatagtaaggattgtaaagtatgtaatgctaagggctgtgttgtcttttcttacgattttaagttttaaaggctgttaaattacagagatgttgcccaaggatacatggggattctcaaaagtaagagatttttacctttttcataatctgccaagctggttcctaatatattgttaaattggtagaaaaatatctttaaattggtgtctgctcaagaattgcttttctagatttgatggagggagggggagagtcacatcatttggattctaccaatctgcaggctctatctttggcaacatgtaaataattagactatacatctgtttctcaagtatggcaagaccaatagtttgaatttaattatcaatgctatggtatactttctggtcatattttagttatgtcagttttaaggtaagttttttcatttattaaagcccttaaatgagattttagactgccaaagagaagaggcagtccaattgacctaactgaaatgagatgaccagtatatagagcctagatggactgtagcagctctacccctttgttttacaaggtaaatcattttaaaaattaccttttttgatcagtgggtaaaagttaaagggatctttaatttttgatatattcaagttaattttctaaatgtgaatcagtccttggactgcaactatatattcacctacaaaatcccaatcaaaaaattacatgagcctgtcaagcagatctttagttttccacttcacataagatcgttaatgttctaaattaatctattcatttagatgatttttgtcagttcttaaatgggatataataaatttagcattttcatcttaacaagcaaaagagttaaaaaacaaaacaaaacactactccaagccaaatacattctagctggttaattccagacttgtcccaagtggttccccaacctcttttccactggtaatttcttttcatgcaggcagaatataggggtgcgagcgctgtgagttttacatatgagcttggataggggaactgaagcgagtcaggagccctgctggaaaaggggtttgccattggattgtctgtggcctggtttctttccagtagtacagtaatagggtagattgaaaacaagtatttacttctgattctgcctgcatttagtgtgaaatgctcttaaggtattgcttctaaaaagcaaattaagcagttaagtataaagtccctgaattcatatttcaaaataaggcttttatgagatttttattaaaaattgcaatagccatcacaaatctgagtttttctaggggtgagagaaaactgtattgtgatgagctagattagttgtagttccagaataagaacaaaaattcagagttgtgtggtgcccatcattgagtaaatgaaccctaaaaatgaataagctaatgaactagttcatggaattatttctgatggtcttttgacctgatgctgccatactgcagtgttaccagctccccctagaaaacggaactgtttaaaaacacagcaagttacagaaaccattttattctacagccattggggtacttcagtttatgggatgtttttggaaacttctgctttgggagggatgaagatcattgataaatgttatttgctttctgagttttggggtcatttcattgcttatcaatgaagggcagacagaggagagaatatctcaagtcttttctgataaaaggcttgcttgagggagcttataacttgcacctagagggtttacccactttgtggatttgatttatccaccaaccacagcaaccaataatgtcaagattctaggagtttatgaaagaggctagtatgttttcattttgagtcagacattcttttctcattctcaaatctgttttaaatgctccaattttaaaaatgccaatgaaaattttataatgcttctgtagtaaccatatgcagtttactttgaatttaggaaaacagttttgtatgatgaaatattgtgcagaatctgtaaataaggtagcttaaaaaaaaaaaaaaagtctaattagaatatgattaatccttaaaatgtagaaactagagattgtgttgagtcagaactgttatgtttgtatccaggtttctattcaccacatataccatcttagaatacacacatatctgtgagttataatttaaagtggtcatccagggaaatgatcatggagtgctactacagatgtacagttttacactactgatgtgttcttgccatacccaagtagggaatcacttccaggaaaacaagtcctcaagcactcaatgactttgtaaacccatgactgaaacaagactcatctgaggcagtaggactggtgggattctactgacttcttagtatcacatggcaccatcacaaatgcattgttagagcagcaacatccagagttcttaagcttgtaccctaacacacaaatttgacttctaaccctgaaatatcctatatatatttctaaaactgtttgtagttttcttgagaaaaagcactttataatttactcagttttcagtaataaaattaacactgacttgaatgtatttaaaaaaattctccacagttttgtcttcctcagattgtttttatccttattctctgaaattcctgttttattgtctaagacttaagagattcagctttatcaagttagagtacagtgtaattcaaattctccctcccttgggcatagttactgaagttcaaatttccttaagtattttttaaaaacctgattttagttttttttttcctgcagaatcttaacttttccattattctggatgacaaataaacatttattaaaatgtgttagaattagtatttactaggttcctaaattgtcagtataggtactttgatcacacatcaaaatggaatttctgcaacttaaagcattttgttacaaattgtagttgaaatagaattttatctatttgtctggatgaataggttgttgggaatgaaccagttatctgttcttttcttccaaatgcaaatggtgcagctagttgataatagtatattctcatcctactataaagtgcaaatttcaccttaattttgcatattttaaaatttttgtttaccctttgtagcatatttacattttagcatttgctaacattgatttaatgtgttaaagattcattttggatatagggttgacttgttggagatactagttcataattttaaaattcccaagagaagtgtctttgaagtggtaaacacagtgcactttaagccacttctcttcccacagagtccagctgaaggaggtaagggcatgctgcatgagagtaatgccgtgatgagtgtcttactctggtaaaatgccatttacaatgcctggagactgaacactgaacaaaacatagtgcccttagaatttcactggaaaaacatgtgaatcacataagttagttggcaaaaggaactgatgtgtatgtggtggggttgctttgaataaagtatttcctaacctattctggggagaacgctcaactgatcttagagaagtgtgaaatcagtttcatagacttagggaaaaatctgaagtgcttgcactgtgagggcagaggcctgcctcattagtctagctgtatgaacatgtcagtccacagaagcagtttttacctgtactcatctgcccttcagtcagctttgtgacagaagggcaaacatcttcacagaagaaaaagttcagaaggttggcattggtggtttcattgctacagaataatagtgttacttgatagtatctgactaaaagagctctcattttctagtacttagtagtaaaaagaatgtggtggagtcctccagatgtctagtgtgggtggaggatatcaactggttatttcagtgatctacagccttaccttttgaatgctaaatgtctggaaacttcaggcagggtcctacaaaacaaactgccatcaagattggtgtgtaccatgaaggcagttttagatagtttgactgttcatggctgcaagaaagacctaaaattcaagggcccgtgaacttcagatacgtaaaaggaatatcacttctgttctagaagagtactaattagacttgtttgtgaaatttgaaaatttggctttgagacactggtaacaaacatatctgagccctcctaagtttggtcagcacggagtagtagctctggcatcatgtggctgtgtagagctccagtgtgatttcaagccccctctaaaaactgccttagtctgcatgaagtagttaactctccaaagtgctttttgtctggcaaatcccttcacaattttcacctctcgtctaaaagcttccttaaaggaagccttccttgatcccttaggctaggttaggtttccagtctgtgttctcatagcactctgcactttttggttccttaaagcaactctgtgttattttttagaattttaatctgaatctcgtgtgtcacatacctaggtcagaaaatactggaacaatgaagttaagatttagtaattcaaattatgtaaaatgctcatatatatgtttttagattagcagctttatgatgccgatgctgaaggaacttttcaccccattcttacaagtctgctactgttttaagtgacatccttatagttgtagataagcaaatgtaaggttatatcaatgtgaagaagcccttagtatcacattttaaaatttatcatttagcaatatgacttttaaatttattgtttccgaatgagtgttgttgaggaatgttagcagtagtaaaatcttgtgttacaagatttttgcatttacatgaactttcactcatttttcagaatttgttcctagagacagagaacccaatacaaaagtgagaacatgtatgcataatcagaaggatgcagtgcagatgcctagtgaaactctgaaagcaaaaatggtacctgagaaagttccccgcagatgtgctactgttgctgcaaataaaataaagataatgagtaatctaaaagaaacgatctcaggaccagaaaatgtctggattaggaagagtagcagaaaactgccccatcgaaatgcttctgctgcggctaagaaaaaattactgaatgtttataaagaggatgatacaaccataaattctgaaagtgaaaaagagctagaagatattaatagaaaaatgctttttttaagggggttcagatcctggaaagaaaatgcacaatagtgactatgagaatgtagaagtggcatctgaaaacaattggtacacaagtaaactggcagttacattctgctcccagctctaaaattactcccttattggcatctttggaggaattttctaaaagccataatccagtgggttcctcccagtcagctcttgtacagacatgtgctctggggaattctgaggaggaaataaattgcagagtctgtaggtggagaggtggaaagaaaagacaaatggcctgctataagactactattcctttccagaatgcaaggccttgaagacatgattccttagaggaagaatataatgggaagtgtacaggctaggaagaacttgaagtgaacaaatttcaaaatcttaacctgatgctaattttcagggttctccattacagtgtaaaaattcagaccacgacaactatggtgtcatgaggaaaaaaaatcaggcatttttccaaaggaagtgctaatgggcctatttgacttctgagtgaagcaaaaactacccagatccattccctacaattcacatccccaaaggtcaaaaacaaactaggaggacctgggaatttcagctggagatactgattattgagttctgaagtagagtgttggaaataggcaattagagaaagtccattgatgtcattttgtttataatattgcagttcatactgaatgaccacttgatatgactaattcagggaatatatatttttctatgaaagctatgaatgttactatcacggcttttccttatttttacttgtatgtagcagcatttacagaaatgccaaaaatgtgcctcattaagaggcaggtcttaatcagttagataaaaataaaatgtatagcttaagatcaaaacagtcatatttttagatacagtgaaatcttttatgtttctctacagcaccttaaaaattagaacttgaatactttgagtaaacttactacaatctcatcccaacaaactttaatggtagcatgtttggcctatttcattgtggcctgtactaggattagaaaatttggtcgtggtataacaaagaagtgtatttacaataggatttaatttgttgttaatatgtatttgttgaaattaaaattgccagattaaatgaatatactgtcgcatctttttaacatagtaacgtgttactggaaaaattaagttgttgaaagtaagttgttttcccatttaaaaatatctgaatatatgatttgcatgtgtaaatctgaaaaactaaactacagaaacctagggttttctatttcttttttaagtcaaatgcatttttttttttgttatacagatgaaccaagtgtctaaaatacttgagaaatttgtggttgcatgtctgttttaaaaaaaaggctttttgttttttagcataagccagaatattctaacctactaagtctgtgtcctttgctccttttgtagtatactttcatctaaattactgatcccaatatgttgatacacaggtgagaaggaagaattcctaataaactgctattacttttaggtgcatggggtttgatttttgagctctaatgaaatgcttaaacttctttccagttcaaattttacacttaatttataatatttattgagtatattatgtcctcaacaagtaactataaaatgaaatacttaactcggtgaagactattttatgcaaagtttttttttttttttttttttttttttagcaatttcagtgtaatgaaagaatttaagctttgaatttataatttgctgtggtggggttaatttctgtcagtatttgagattgtattatcagtcttgcataatgaaatccttttttggctaagtatttaattcgaacatatttgcctttttaaaaagtgcttggcctaaacttattgtaactgcatgaaataagcatttgcttaaaacttaacattgtaaaattgttctctctgaaatgtgtgcagaatttaaatcatggccaaatgtattactattaccctatttacagtaatttgctttgcagaaaatatttcttcatcatggaactgtgaaatcaaattgaagatcttactggtaaaaatgacaaattaacaaaaggactaagacaagtggtgcccaaacaacctttttattctgcagttccatcatcataatagaccagttaacccaggagtcctaatgttttaaaacatcattgtggtgatcttgtttattctatctcactaaggatatccagtttcctaagctcttactggctagcaatttcgtcttaattttattgctaaatgttcaaattttgcttccaaactcactttatttttgcagatgtgtacatctgctaaatactaattttatgtaaatgattttgttgattatctttccacatcttaaaatgtttctaacagctttgagattttatctcaacaggctctctctgaccccaaagtagtacttaccttcgtgactactgacaaagtcacaaaatgcaggcgatgtcatgtatttcggtacaactaaatctaggaaacggttttttcattgcattactgcatattttcattttcatttaaattatgmtaccgcgaagggkatcgtctagag

SEQ ID NO: 17 - DNA, 19344 bp, Homo sapien
ggtccaggcggcgcgcacggtatggcggcggcggcggcggcggcggcggcgcgcgcctgagaagaggggacgccagcccggtcaggcctcggcgcggcctacacgctccgctcgctcgctcgctcccgcctcccgccccgcgcccggccatggcggagccgtcgtccgcccgacgcccggtgcctctcatcgagtcggagctgtacttccttatcgcccggtacctatcggcgggcccgtgtcggagagcggcccaggtgctggtgcaggagctggagcagtaccagttgttgccgaagagattggactgggagggcaacgagcacaacaggagctacgaggagttggtcttgtccaataagcatgtggctcctgatcatcttttgcaaatctgccagcgcatcggtcctatgttggataaagaaattccacccagtatttcaagagtcacttctttacttggtgcaggaaggcagtctttgctacgtacagcaaaagactgcaggcacacagtttggaagggctctgcctttgctgctcttcatagaggaagacctcctgaaatgccagtgaattatggttccccaccaaatcttgtggagatacatcgaggaaaacaactcacagggtgttccacttttagtacagcatttccaggaactatgtatcagcatataaaaatgcacagaaggattctcggacatctatctgctgtttactgtgtagcatttgataggacaggacatagaatctttacaggttcagatgactgtttggtaaagatttggtcaacacataatggccgcttgttatctacattaagaggtcattctgcagaaatttcagatatggcagtaaactatgagaatacaatgattgctgcggggagctgtgataaaattattagagtgtggtgcttgagaacttgtgccccagttgctgtgctccaaggacacacaggatcaattacatctttacagtttagcccgatggccaaaggctctcaaagatacatggtttccactggtgctgatgggacagtttgcttttggcaatgggatttagaatccttaaaatttagcccacgtcccctgaagttcactgaaaagcctaggccaggcgttcaaatgctttgttcttcttttagtgttggtggtatgtttttagccacaggtagtactgatcatgtaatcagaatgtattttttgggttttgaagcacccgaaaaaatcgcagaacttgaaagccacactgataaagtagatagtatccaattttgtaacaatggtgatcggttcctaagtggtagcagagatggaacagcacggatttggagatttgagcagttagaatggaggagcattttattggatatggctaccagaatctcaggggacttatcttccgaagaggaaaggtttatgaaacctaaagtaacaatgatagcttggaatcaaaatgatagcattgttgtcacagctgtgaatgatcatgtcctcaaagtgtggaattcttacactggacaactgcttcataacttaatggtaggtaatttctggtacaatgtaacaaatgagattttttgaaatatgattgtaattttgaagctataaaaataatatattgaacaagttgtttctctcatgtaaactatgaaatgattagaaatttttataattataaattattgtcgaatacatttctaaaagtatatgctgtaacagtatgtatttttaaattttcaatttgtaacttgtaaaccctccttaatgttatgactttgttaaataaagggacatgctgatgaagtatttgttctggagacacatccctttgattccagaattatgttatctgcaggacatgatggcagcatatttatatgggatattacaaaaggtaccaagatgaaacattattttaatatgattgaaggacaaggacatggagctgtgtttgactgtaagttttcacaggatggacagcattttgcctgtacagattctcatgggcaccttctgatatttggttttggatgcagcaaaccatatgaaaagattcctgatcagatgttcttccatactgactatcgaccacttattagagattctaataattatgtcttagatgagcaaactcagcaggctcctcatcttatgcctccaccattcttggtagatgtagatggaaatcctcatccaaccaagtatcagagattagtaccaggccgagaaaattctgcagatgaacatttgattccacagctgggctatgtggcaacaagtgatggagaggtgattgaacaaattataagcctgcaaaccaatgataatgatgaacgcagcccagaatcgagtattcttgatggaatgataagacagttgcagcagcagcaagatcagagaatgggagcagatcaggatactattccaagaggactttcaaatggtgaagaaacaccccggagaggttttagaaggctgagcttagacattcagtcccctccaaatattggtctgcgtcgtagtggacaagttgaaggtgttcgtcagatgcatcaaaacgctccacgcagtcagattgctacagaacgtgacctgcaggcttggaaacgaagagtggttgtaccagaggtaccactaggcatatttaggaagctggaagacttccgattagagaaaggtgaagaggaaagaaatctttatataataggaagaaaaagaaagactcttcagctctcacataagtcggattcagtggttttggtatcacagtctagacaaaggacatgtaggcgtaaatatccaaattatggtagaagaaatcgtagctggcgtgagttatcttctggaaatgagtcttcaagctctgtaagacatgagacttcctgtgatcagagtgaaggttctggttcttcagaagaggatgaatggagaagtgacagaaaaagtgagagttacagcgaaagttcaagtgactcttcatctagatattccgattggacagctgatgcgggcatcaatttgcagcctcctttaagaacatcatgtcgtcgacgaattactcgattttgtagtagttcagaagatgaaatatctactgagaatttatctcctccaaaaagaagacgaaagagaaagaaagaaaataagcctaagaaggagaatttgcggaggatgactccagcagagcttgcaaatatggagcatttatatgaatttcaccctccagtttggattactgacaccacacttagaaaatctccttttgttcctcaaatgggtgatgaggtaatatattttcgacagggtcatgaagcttatattgaggctgtaagaagaaataatatttatgaactgaaccctaataaggagccatggagaaaaatggatcttaggtatcagagaagcagacactggggggaaggttgactatggcaaatccatttgatggatactccatccaggatcaagaattggttaaaatagttggaatacgatatgaagttgggccccctacactctgttgcctaaaactagcatttatagatccagcaactggaaaacttatggacaaatctttctctattagatatcatgatatgccagatgttattgactttcttgtattgcgtcaattttatgatgaagcaagacagaggaattggcagtcttgtgacagattccgctctattattgatgatgcttggtggtttggaacagtgttaagtcaagagccatatcaaccacagtatcctgatagtcatttccagtgttatattgttaggtgggataatactgaaattgaaaaacttagcccatgggacatggaaccaattcctgataatgttgatccacctgaagaattaggagctagtatttctgtcacaacagatgagctagagaaattgctctataaaccacaagctggtgaatggggtcagaaatcaagagatgaagaatgtgatagaattatcagtggtatagatcaacttttgaatcttgatatagcagcagcttttgcaggccctgttgatttgtgtacatacccgaagtactgtactgtagtagcttatccaaccgatctttacacaattcgaatgagacttgttaatcgattttacaggaggctgtctgcgttagtttgggaagtcagatatatagaacataatgccagaacatttaacgaacctgagagtgtaattgcaagatcagctaaaaagataactgaccaacttttaaaatttatcaagaatcaacactgtacaaatatctcagaactttctaacacatctgaaaatgatgagcaaaatgctgaggatttggatgatagtgatcttcctaaaacatcttctggaagaaggagagtccatgatgggaaaaaaagcatcagagctacgaactatgttgaaagcaactggaagaaacagtgtaaggaactagtgaacttaatttttcagtgtgaagattctgaaccatttagacaacctgttgatttggttgaatatccagactacagagatattatagataccccaatggattttggaacagtaagggaaactctagatgcgggaaattatgacagccctttggagttttgcaaagacatccggctgatatttagcaatgcaaaagcgtatacaccaaacaaaagatcaaagatttatagtatgaccttgagattatctgccttatttgaagaaaaaatgaagaaaatctcttctgattttaaaattggtcaaaaattcaatgaaaaacttcgaagaagccagaggttcaagcaacggcaaaattgtaaaggtgacagtcagcctaacaaaagtatcagaaacctcaagccgaagaggttaaaatctcagacaaaaataattcctgagttggtaggttctcctacccagtctacctcaagtaggacagcttatcttggaacccacaagacaagtgctggtatctcttcaggtgttacttctggtgactcttcagattcagcagaatcatcagaaaggaggaaaagaaatagacctataacaaatggttctacattatctgaaagtgaagtggaagattctttagctacctctttgtcatcgtcagcttccagtagttctgaggaaagcaaagagagttccagagctcgtgaatcctcctcacgcagtgggctatccagaagcagcaatctcagggtaaccagaactagagctgctcaaagaaaaactggtcccgtttcattagcaaatggatgtggcagaaaagccactcgaaagagagtctatttaagtgattctgataacaattcattggagactggtgaaattctaaaagccagagctggaaataaccgaaaagtcttaaggaagtgtgctgctgtggctgccaataaaataaagctaatgagtgatgtagaagagaattctagctctgaaagtgtctgttctggtcggaagctgcctcaccgcaatgcttctgctgtagctagaaaaaagttattacataattctgaagatgaacagagcttaaagtcagaaattgaagaagaggagctaaaagatgaaaatcaacyattaccagtgtccagttctcacactgcccagagcaatgttgatgaatctgaaaacagagactcagagtcagaaagtgatttgcgggtagcccggaaaaattggcatgctaatggttacaagtcccatactccagcaccttcaaagacaaaatttcttaaaatagagtcttctgaggaagactctaaaagtcatgattcagatcatgcatgtaacagaactgctggcccatcaacgtctgtgcagaaacttaaggcagagagcatctcagaggaagcagattctgaaccaggaagatctggtggtaggaaatacaatacatttcacaagaatgcgagtttctttaaaaaaaccaagattctgagtgactcagaagactctgaatctgaagagcaagatagagaagatgggaaatgtcataaaatggaaatgaacccaatttcaggaaatctgaactgtgaccctattgctatgtcccagtgttcctcagatcatggatgtgaaactgatttagattcagatgatgacaaaatagaaaaaccaaacaattttatgaaagattctgcatcacaagacaatggactaagcagaaaaatttccaggaaaagggtctgttccagtgactcagacagtagtttacaggtggttaagaaatcatcaaaagccagaacaggtctcctgaggattactcgaagatgtgcagctacggctgccaataagatcaagctcatgagtgatgtagaagatgtcagtttagaaaatgtgcacactagaagcaaaaatggaaggaaaaaacctctccatcttgcttgtactacagctaagaagaaattgagtgattgtgaaggaagtgtacattgtgaagtaccaagtgaacagtatgcctgtgaaggcaagccacctgatcctgactccgaaggtagtacaaaagtgcttagtcaggctctaaatggagactcagactctgaagatatgttgaattcagaacacaagcacaggcataccaatattcacaaaatagatgcaccttctaaaagaaaaagttcctctgttacatcttcaggagaagattcaaaaagtcatattccagggagtgagactgataggacattttcttcagagtcaaccttggcacaaaaagctactgcagagaataattttgaagtggaactgaattatgggctgcgcaggtggaatggcagaagactcaggacctatggaaaggctccttttagtaagacaaaagtgattcatgattcacaggaaacagcagagaaggaagtaaaaaggaagagatcgcatcctgaattggaaaatgtgaaaatctctgaaacaactgggaattcaaagtttagacctgatactagttccaaatcatcagatttgggatctgtaactgaatcagatattgactgtactgataatacaaaaaccaaaaggaggaaaacgaaaggaaaagcaaaagtagttagaaaaggtaaaacttttacagctaacatatctaaaactgtgagacgtcaaagacaaagcaaacgccctaggttaagtgtggatgataatgactgggaggatttggactatgcaaaatctaaaagagttcttcgacgttcaaaaataaaaacgagaaatcagggtagaaggactgtgagataccatgatggggatgatgacagaagtttagaaaatgtgttagatttcaatggttgcaccttatgaccttgagggaaagccagttcatttaagaggaaatggactggcatttatggtgaaagctggctgttaaaattatttttttgtcttacaattcagggaatatatttatatttttctatgaaaagttatgaatgtgactaaatcatgactgttatttttatttgcacttgctggtctttgtagcagcattcagcacaggtgccaaaatatgcttcattttgggggcagatctattttgacagtatttgactacatatagcaagagtttgaaatatgttaaacactagacatcctggttatcaaaaccaatgagcattactttcatggcagcaagtgtcatgcagttattttctgaatttgtcaaagaggcagtagtttctaacccctgttctatagtagttacaacaatttcacaacctatgtttacagattcttcataaatacatgcatactgacactataatcatgggaggtgtaaccatgattagtaggcgaggtacctaccactttttttttttcttcccctggctacttgagtagaatgcattataccagatctggtcactttcattgaaatggtttctaattttcttcccaagtgctgttgggtttttttcttcttaaggaaaacgttgtcacttttatgttataaacttgaatttataaagtgctggtaaattatttttaatgatttgagtgcatgttttaaacctctaggaccagagcatagtcagagcattttcttttaaattgtgcactaacaaaatgctatataatctgtcttctgtccaagatctcctggtttccattgtaagggatttaaccaaaatcttgctcttccataatcttactctgtgaaatagaggaattcgtgtgccttagatttagaagtgtgttctttaatagagtgtacagggctaaaagagtatttaagttaatatgtaggtttcccccatctgtattccaattgtagaggtgagttttgttaagagtacaattgcaaatcttatctatataggaaaatagctaaatgtcattctccatctctttgttttagtttactgcttccatgtgcaatcctaagcattctttgctggggcaactaaatgtatctttattagtgacttctagtccaaatataagaaactgtcatgttttgtgggaaaataattttataatccatttaaagtgaaagtttatcacacaaatagtacacttattttctaaccaaatacttgataggttatgctactccagtgtagatggccattcctaacttgtttgtgcctgaagatggacttgattcaaatggtttacatatttagtgggtaagggatatgttacagtaccccacctgtaagttatttattagccctaattgtgtttgatttcagacaaaattaacccttttctcctgtgtatctttgaagtggcagataaggtgaagcatcagactggtatcaatattagacaatgttatttattagccctaattgtgtttggtttcagacaaaaccttttctcctgtgtatctttgaagtggcagacaaggcgaacatcagactggtattaatgttagagaatgttctgaagtgttcctattttgtagttatctattccatttgacatagtagaaggtacattttctttctactctgatgcatggggaaggatgtttttggacattatcaactgagataggtgggaaacctcctctcatttgtggcttagagagctatcaccatttcagaactatgatgcttttcttctcagaacttgtgttaagtagatagtaaacagattgattcatgataattgtccttgactaagactgaaaagactaatgggatgccttttactttgctaattttaaaaactggtgatagatgtcaaatccattaatttatttaaactcttcttaaccttctcttttataatctgttctcaggttttaactccatgtttaccatcatttgcaaaaaggtaccaaaaaaatccataaataaatatggaatacattcataagtacatacattcttttggtataaaacaatattttgacagtttaggcttcattaatagaactattctgattatttggactgcattaattggtcattgactggccatccaattaccattttttctttcagtccaaaatagttagacccttgcatacagaagtggtattttggtttttaatcagatttggtttcatcagaagcagcaagaatggacctgatgtctttaaaagcatagccgacaatggtagcttctcaagttatgaaataaaactgagagataatggagaaaataatttttatgggtttttttggttatggtgctattcctaaggttaactttgaatatgtgacacacacactcctaagtacctttaaggaaaattaataaatcattaatagttaaaatgtttacattgagcactagaacatgtttggccttttttttctacgttatgcaaaatgcccagggatttaatgcacaggtgtactttaatgtttagggtcagtttgtagtattcttgagaaaaagataaagggttataatttgaatgtgaactgatccagaaataagtgctgtacctttccactgcacttgaagttcaacttaatggtgtatgtgaaaaacaaaaactactttggttgtgtatgtccaaagtcctatggttttattcatttatggttttacaggctttgaagtactcagatttgatttttgctttcttggaaagactcactttaccaagcatataaaggaaaaatgatttcaaacattgacaagatagatgagtgttaacaaagctttcttttttcgtgtcctccttatttaaaaaggtatacttacaatgtgaagtaacttatgaataaaaggaaaagtttatcccatattcaaataattcctaaggtcagcctccctttttgtaagtggcaaatatctgattaaatcatttctcagtttattaatccttggaaacaatgatatagcagttactcacagcttgtaaattacaacagaaaggttcctttcaaatagtagagctgcacctaaagaggaaattgggtttataagaaaatggaggcaaagaacttaagttttaagaaaaagcacttcaaaacagaagggcaaatggaaaaggggaatataaaacaaaccaataaaaataccatctgagggtgttactgtccaaaagtaaagaataagatgcatcactaagccctttgcactcgttatgacctcgtaagtaaaaattatcacttagaataaggggtgcacactacattccctctgtcttctagacttttttttttgtagaagaatcagaaaacaatttactaacctccctgtttgatattaaaaataggaagaattttaatattttctgttagtacaagttgaacttgattgtgccaactgaaaccccagaggtttgtatatcagtagaatgcaagaacattgttaaaggtgcttacgatcttttttgttttcctttccactccattgtatcaattttttgagtaacttttaaatggctagaaaatggtctttttgctttgcccttttaaagctgaaataaccagctccattcttttcatgaatagtaagttgatatatttatttatcaggtatcttgcagttgtcaccaaatactgtagttttcttatgttgtatggaaattatagttcaattattttaatgtgatggagtgcaacaagtcattgtagaacttttcacctgttaatgttgaagttatacctctgaatttctgctgtggatatcaaggaaataataaagcagaaaccccaagaaatttgcaacttaacagtttgagactgtctcttatcctagtatttgggaagagaaggaataaatttgtcaaaactaggtgagaaaatagagcattgtgggaaaaactgagtccaactagattagcaaatgttaattcctagctcaaactgtgaatagtaaggattgtaaagtatgtaatgctaagggctgtgttgtcttttcttacgattttaagttttaaaggctgttaaattacagagatgttgcccaaggatacatggggattctcaaaagtaagagatttttacctttttcataatctgccaagctggttcctaatatattgttaaattggtagaaaaatatctttaaattggtgtctgctcaagaattgcttttctagatttgatggagggagggggagagtcacatcatttggattctaccaatctgcaggctctatctttggcaacatgtaaataattagactatacatctgtttctcaagtatggcaagaccaatagtttgaatttaattatcaatgctatggtatactttctggtcatattttagttatgtcagttttaaggtaagttttttcatttattaaagcccttaaatgagattttagactgccaaagagaagaggcagtccaattgacctaactgaaatgagatgaccagtatatagagcctagatggactgtagcagctctacccctttgttttacaaggtaaatcattttaaaaattaccttttttgatcagtgggtaaaagttaaagggatctttaatttttgatatattcaagttaattttctaaatgtgaatcagtccttggactgcaactatatattcacctacaaaatcccaatcaaaaaattacatgagcctgtcaagcagatctttagttttccacttcacataagatcgttaatgttctaaattaatctattcatttagatgatttttgtcagttcttaaatgggatataataaatttagcattttcatcttaacaagcaaaagagttaaaaaacaaaacaaaacactactccaagccaaatacattctagctggttaattccagacttgtcccaagtggttccccaacctcttttccactggtaatttcttttcatgcaggcagaatataggggtgcgagcgctgtgagttttacatatgagcttggataggggaactgaagcgagtcaggagccctgctggaaaaggggtttgccattggattgtctgtggcctggtttctttccagtagtacagtaatagggtagattgaaaacaagtatttacttctgattctgcctgcatttagtgtgaaatgctcttaaggtattgcttctaaaaagcaaattaagcagttaagtataaagtccctgaattcatatttcaaaataaggcttttatgagatttttattaaaaattgcaatagccatcacaaatctgagtttttctaggggtgagagaaaactgtattgtgatgagctagattagttgtagttccagaataagaacaaaaattcagagttgtgtggtgcccatcattgagtaaatgaaccctaaaaatgaataagctaatgaactagttcatggaattatttctgatggtcttttgacctgatgctgccatactgcagtgttaccagctccccctagaaaacggaactgtttaaaaacacagcaagttacagaaaccattttattctacagccattggggtacttcagtttatgggatgtttttggaaacttctgctttgggagggatgaagatcattgataaatgttatttgctttctgagttttggggtcatttcattgcttatcaatgaagggcagacagaggagagaatatctcaagtcttttctgataaaaggcttgcttgagggagcttataacttgcacctagagggtttacccactttgtggatttgatttatccaccaaccacagcaaccaataatgtcaagattctaggagtttatgaaagaggctagtatgttttcattttgagtcagacattcttttctcattctcaaatctgttttaaatgctccaattttaaaaatgccaatgaaaattttataatgcttctgtagtaaccatatgcagtttactttgaatttaggaaaacagttttgtatgatgaaatattgtgcagaatctgtaaataaggtagcttaaaaaaaaaaaaaaagtctaattagaatatgattaatccttaaaatgtagaaactagagattgtgttgagtcagaactgttatgtttgtatccaggtttctattcaccacatataccatcttagaatacacacatatctgtgagttataatttaaagtggtcatccagggaaatgatcatggagtgctactacagatgtacagttttacactactgatgtgttcttgccatacccaagtagggaatcacttccaggaaaacaagtcctcaagcactcaatgactttgtaaacccatgactgaaacaagactcatctgaggcagtaggactggtgggattctactgacttcttagtatcacatggcaccatcacaaatgcattgttagagcagcaacatccagagttcttaagcttgtaccctaacacacaaatttgacttctaaccctgaaatatcctatatatatttctaaaactgtttgtagttttcttgagaaaaagcactttataatttactcagttttcagtaataaaattaacactgacttgaatgtatttaaaaaaattctccacagttttgtcttcctcagattgtttttatccttattctctgaaattcctgttttattgtctaagacttaagagattcagctttatcaagttagagtacagtgtaattcaaattctccctcccttgggcatagttactgaagttcaaatttccttaagtattttttaaaaacctgattttagttttttttttcctgcagaatcttaacttttccattattctggatgacaaataaacatttattaaaatgtgttagaattagtatttactaggttcctaaattgtcagtataggtactttgatcacacatcaaaatggaatttctgcaacttaaagcattttgttacaaattgtagttgaaatagaattttatctatttgtctggatgaataggttgttgggaatgaaccagttatctgttcttttcttccaaatgcaaatggtgcagctagttgataatagtatattctcatcctactataaagtgcaaatttcaccttaattttgcatattttaaaatttttgtttaccctttgtagcatatttacattttagcatttgctaacattgatttaatgtgttaaagattcattttggatatagggttgacttgttggagatactagttcataattttaaaattcccaagagaagtgtctttgaagtggtaaacacagtgcactttaagccacttctcttcccacagagtccagctgaaggaggtaagggcatgctgcatgagagtaatgccgtgatgagtgtcttactctggtaaaatgccatttacaatgcctggagactgaacactgaacaaaacatagtgcccttagaatttcactggaaaaacatgtgaatcacataagttagttggcaaaaggaactgatgtgtatgtggtggggttgctttgaataaagtatttcctaacctattctggggagaacgctcaactgatcttagagaagtgtgaaatcagtttcatagacttagggaaaaatctgaagtgcttgcactgtgagggcagaggcctgcctcattagtctagctgtatgaacatgtcagtccacagaagcagtttttacctgtactcatctgcccttcagtcagctttgtgacagaagggcaaacatcttcacagaagaaaaagttcagaaggttggcattggtggtttcattgctacagaataatagtgttacttgatagtatctgactaaaagagctctcattttctagtacttagtagtaaaaagaatgtggtggagtcctccagatgtctagtgtgggtggaggatatcaactggttatttcagtgatctacagccttaccttttgaatgctaaatgtctggaaacttcaggcagggtcctacaaaacaaactgccatcaagattggtgtgtaccatgaaggcagttttagatagtttgactgttcatggctgcaagaaagacctaaaattcaagggcccgtgaacttcagatacgtaaaaggaatatcacttctgttctagaagagtactaattagacttgtttgtgaaatttgaaaatttggctttgagacactggtaacaaacatatctgagccctcctaagtttggtcagcacggagtagtagctctggcatcatgtggctgtgtagagctccagtgtgatttcaagccccctctaaaaactgccttagtctgcatgaagtagttaactctccaaagtgctttttgtctggcaaatcccttcacaattttcacctctcgtctaaaagcttccttaaaggaagccttccttgatcccttaggctaggttaggtttccagtctgtgttctcatagcactctgcactttttggttccttaaagcaactctgtgttattttttagaattttaatctgaatctcgtgtgtcacatacctaggtcagaaaatactggaacaatgaagttaagatttagtaattcaaattatgtaaaatgctcatatatatgtttttagattagcagctttatgatgccgatgctgaaggaacttttcaccccattcttacaagtctgctactgttttaagtgacatccttatagttgtagataagcaaatgtaaggttatatcaatgtgaagaagcccttagtatcacattttaaaatttatcatttagcaatatgacttttaaatttattgtttccgaatgagtgttgttgaggaatgttagcagtagtaaaatcttgtgttacaagatttttgcatttacatgaactttcactcatttttcagaatttgttcctagagacagagaacccaatacaaaagtgagaacatgtatgcataatcagaaggatgcagtgcagatgcctagtgaaactctgaaagcaaaaatggtacctgagaaagttccccgcagatgtgctactgttgctgcaaataaaataaagataatgagtaatctaaaagaaacgatctcaggaccagaaaatgtctggattaggaagagtagcagaaaactgccccatcgaaatgcttctgctgcggctaagaaaaaattactgaatgtttataaagaggatgatacaaccataaattctgaaagtgaaaaagagctagaagatattaatagaaaaatgctttttttaagggggttcagatcctggaaagaaaatgcacaatagtgactatgagaatgtagaagtggcatctgaaaacaattggtacacaagtaaactggcagttacattctgctcccagctctaaaattactcccttattggcatctttggaggaattttctaaaagccataatccagtgggttcctcccagtcagctcttgtacagacatgtgctctggggaattctgaggaggaaataaattgcagagtctgtaggtggagaggtggaaagaaaagacaaatggcctgctataagactactattcctttccagaatgcaaggccttgaagacatgattccttagaggaagaatataatgggaagtgtacaggctaggaagaacttgaagtgaacaaatttcaaaatcttaacctgatgctaattttcagggttctccattacagtgtaaaaattcagaccacgacaactatggtgtcatgaggaaaaaaaatcaggcatttttccaaaggaagtgctaatgggcctatttgacttctgagtgaagcaaaaactacccagatccattccctacaattcacatccccaaaggtcaaaaacaaactaggaggacctgggaatttcagctggagatactgattattgagttctgaagtagagtgttggaaataggcaattagagaaagtccattgatgtcattttgtttataatattgcagttcatactgaatgaccacttgatatgactaattcagggaatatatatttttctatgaaagctatgaatgttactatcacggcttttccttatttttacttgtatgtagcagcatttacagaaatgccaaaaatgtgcctcattaagaggcaggtcttaatcagttagataaaaataaaatgtatagcttaagatcaaaacagtcatatttttagatacagtgaaatcttttatgtttctctacagcaccttaaaaattagaacttgaatactttgagtaaacttactacaatctcatcccaacaaactttaatggtagcatgtttggcctatttcattgtggcctgtactaggattagaaaatttggtcgtggtataacaaagaagtgtatttacaataggatttaatttgttgttaatatgtatttgttgaaattaaaattgccagattaaatgaatatactgtcgcatctttttaacatagtaacgtgttactggaaaaattaagttgttgaaagtaagttgttttcccatttaaaaatatctgaatatatgatttgcatgtgtaaatctgaaaaactaaactacagaaacctagggttttctatttcttttttaagtcaaatgcatttttttttttgttatacagatgaaccaagtgtctaaaatacttgagaaatttgtggttgcatgtctgttttaaaaaaaaggctttttgttttttagcataagccagaatattctaacctactaagtctgtgtcctttgctccttttgtagtatactttcatctaaattactgatcccaatatgttgatacacaggtgagaaggaagaattcctaataaactgctattacttttaggtgcatggggtttgatttttgagctctaatgaaatgcttaaacttctttccagttcaaattttacacttaatttataatatttattgagtatattatgtcctcaacaagtaactataaaatgaaatacttaactcggtgaagactattttatgcaaagtttttttttttttttttttttttttttagcaatttcagtgtaatgaaagaatttaagctttgaatttataatttgctgtggtggggttaatttctgtcagtatttgagattgtattatcagtcttgcataatgaaatccttttttggctaagtatttaattcgaacatatttgcctttttaaaaagtgcttggcctaaacttattgtaactgcatgaaataagcatttgcttaaaacttaacattgtaaaattgttctctctgaaatgtgtgcagaatttaaatcatggccaaatgtattactattaccctatttacagtaatttgctttgcagaaaatatttcttcatcatggaactgtgaaatcaaattgaagatcttactggtaaaaatgacaaattaacaaaaggactaagacaagtggtgcccaaacaacctttttattctgcagttccatcatcataatagaccagttaacccaggagtcctaatgttttaaaacatcattgtggtgatcttgtttattctatctcactaaggatatccagtttcctaagctcttactggctagcaatttcgtcttaattttattgctaaatgttcaaattttgcttccaaactcactttatttttgcagatgtgtacatctgctaaatactaattttatgtaaatgattttgttgattatctttccacatcttaaaatgtttctaacagctttgagattttatctcaacaggctctctctgaccccaaagtagtacttaccttcgtgactactgacaaagtcacaaaatgcaggcgatgtcatgtatttcggtacaactaaatctaggaaacggttttttcattgcattactgcatattttcattttcatttaaattatgtcccctttttctcttgcttgaaacagtgctcctcgaactttgtcttccagcacattttaaagagaaccaattaaagaacaatcacacattctgcttattaaaggctatttaaaaagaaacattttgtattagaaaatggccaactttaaaacactattttttacactcataaaaatgttttttaaatcgccttgacaatcatcagcttttgaaatgtgaattcctattgccagagtaaaggtctcgtttttatacca

SEQ ID NO: 18 - DNA, 19707 bp, Homo sapien
ggtccaggcggcgcgcacggtatggcggcggcggcggcggcggcggcggcgcgcgcctgagaagaggggacgccagcccggtcaggcctcggcgcggcctacacgctccgctcgctcgctcgctcccgcctcccgccccgcgcccggccatggcggagccgtcgtccgcccgacgcccggtgcctctcatcgagtcggagctgtacttccttatcgcccggtacctatcggcgggcccgtgtcggagagcggcccaggtgctggtgcaggagctggagcagtaccagttgttgccgaagagattggactgggagggcaacgagcacaacaggagctacgaggagttggtcttgtccaataagcatgtggctcctgatcatcttttgcaaatctgccagcgcatcggtcctatgttggataaagaaattccacccagtatttcaagagtcacttctttacttggtgcaggaaggcagtctttgctacgtacagcaaaagactgcaggcacacagtttggaagggctctgcctttgctgctcttcatagaggaagacctcctgaaatgccagtgaattatggttccccaccaaatcttggtaagtaaggttggcctttgagatgcctgaaataattgtttttaaatttctcaacaacctttataaatgctgtattaaaatttaaaaggaaatactggttaaaatgttgttttaatagtaataagtatcaaatgtcaaattattgttaaaataattacactaaaaataaaattaataaaaaatctttttatagtaagaagtctatgttactgaatacagaagaatagaattgggaagaaattgtgtcattagggcttcttgaacatagatttttgtgaccctctagaaattgttatttgagtttttcttagatttttccttattggctctcccttaaccattttcattgtttttatttcctagtggagatacatcgaggaaaacaactcacagggtgttccacttttagtacagcatttccaggaactatgtatcagcatataaaaatgcacagaaggattctcggacatctatctgctgtttactgtgtagcatttgataggacaggacatagaatctttacaggttcagatgactgtttggtaaagatttggtcaacacataatggccgcttgttatctacattaagaggtcattctgcagaaatttcagatatggcagtaaactatgagaatacaatgattgctgcggggagctgtgataaaattattagagtgtggtgcttgagaacttgtgccccagttgctgtgctccaaggacacacaggatcaattacatctttacagtttagcccgatggccaaaggctctcaaagatacatggtttccactggtgctgatgggacagtttgcttttggcaatgggatttagaatccttaaaatttagcccacgtcccctgaagttcactgaaaagcctaggccaggcgttcaaatgctttgttcttcttttagtgttggtggtatgtttttagccacaggtagtactgatcatgtaatcagaatgtattttttgggttttgaagcacccgaaaaaatcgcagaacttgaaagccacactgataaagtagatagtatccaattttgtaacaatggtgatcggttcctaagtggtagcagagatggaacagcacggatttggagatttgagcagttagaatggaggagcattttattggatatggctaccagaatctcaggggacttatcttccgaagaggaaaggtttatgaaacctaaagtaacaatgatagcttggaatcaaaatgatagcattgttgtcacagctgtgaatgatcatgtcctcaaagtgtggaattcttacactggacaactgcttcataacttaatggtaggtaatttctggtacaatgtaacaaatgagattttttgaaatatgattgtaattttgaagctataaaaataatatattgaacaagttgtttctctcatgtaaactatgaaatgattagaaatttttataattataaattattgtcgaatacatttctaaaagtatatgctgtaacagtatgtatttttaaattttcaatttgtaacttgtaaaccctccttaatgttatgactttgttaaataaagggacatgctgatgaagtatttgttctggagacacatccctttgattccagaattatgttatctgcaggacatgatggcagcatatttatatgggatattacaaaaggtaccaagatgaaacattattttaatatgattgaaggacaaggacatggagctgtgtttgactgtaagttttcacaggatggacagcattttgcctgtacagattctcatgggcaccttctgatatttggttttggatgcagcaaaccatatgaaaagattcctgatcagatgttcttccatactgactatcgaccacttattagagattctaataattatgtcttagatgagcaaactcagcaggctcctcatcttatgcctccaccattcttggtagatgtagatggaaatcctcatccaaccaagtatcagagattagtaccaggccgagaaaattctgcagatgaacatttgattccacagctgggctatgtggcaacaagtgatggagaggtgattgaacaaattataagcctgcaaaccaatgataatgatgaacgcagcccagaatcgagtattcttgatggaatgataagacagttgcagcagcagcaagatcagagaatgggagcagatcaggatactattccaagaggactttcaaatggtgaagaaacaccccggagaggttttagaaggctgagcttagacattcagtcccctccaaatattggtctgcgtcgtagtggacaagttgaaggtgttcgtcagatgcatcaaaacgctccacgcagtcagattgctacagaacgtgacctgcaggcttggaaacgaagagtggttgtaccagaggtaccactaggcatatttaggaagctggaagacttccgattagagaaaggtgaagaggaaagaaatctttatataataggaagaaaaagaaagactcttcagctctcacataagtcggattcagtggttttggtatcacagtctagacaaaggacatgtaggcgtaaatatccaaattatggtagaagaaatcgtagctggcgtgagttatcttctggaaatgagtcttcaagctctgtaagacatgagacttcctgtgatcagagtgaaggttctggttcttcagaagaggatgaatggagaagtgacagaaaaagtgagagttacagcgaaagttcaagtgactcttcatctagatattccgattggacagctgatgcgggcatcaatttgcagcctcctttaagaacatcatgtcgtcgacgaattactcgattttgtagtagttcagaagatgaaatatctactgagaatttatctcctccaaaaagaagacgaaagagaaagaaagaaaataagcctaagaaggagaatttgcggaggatgactccagcagagcttgcaaatatggagcatttatatgaatttcaccctccagtttggattactgacaccacacttagaaaatctccttttgttcctcaaatgggtgatgaggtaatatattttcgacagggtcatgaagcttatattgaggctgtaagaagaaataatatttatgaactgaaccctaataaggagccatggagaaaaatggatcttaggtatcagagaagcagacactggggggaaggttgactatggcaaatccatttgatggatactccatccaggatcaagaattggttaaaatagttggaatacgatatgaagttgggccccctacactctgttgcctaaaactagcatttatagatccagcaactggaaaacttatggacaaatctttctctattagatatcatgatatgccagatgttattgactttcttgtattgcgtcaattttatgatgaagcaagacagaggaattggcagtcttgtgacagattccgctctattattgatgatgcttggtggtttggaacagtgttaagtcaagagccatatcaaccacagtatcctgatagtcatttccagtgttatattgttaggtgggataatactgaaattgaaaaacttagcccatgggacatggaaccaattcctgataatgttgatccacctgaagaattaggagctagtatttctgtcacaacagatgagctagagaaattgctctataaaccacaagctggtgaatggggtcagaaatcaagagatgaagaatgtgatagaattatcagtggtatagatcaacttttgaatcttgatatagcagcagcttttgcaggccctgttgatttgtgtacatacccgaagtactgtactgtagtagcttatccaaccgatctttacacaattcgaatgagacttgttaatcgattttacaggaggctgtctgcgttagtttgggaagtcagatatatagaacataatgccagaacatttaacgaacctgagagtgtaattgcaagatcagctaaaaagataactgaccaacttttaaaatttatcaagaatcaacactgtacaaatatctcagaactttctaacacatctgaaaatgatgagcaaaatgctgaggatttggatgatagtgatcttcctaaaacatcttctggaagaaggagagtccatgatgggaaaaaaagcatcagagctacgaactatgttgaaagcaactggaagaaacagtgtaaggaactagtgaacttaatttttcagtgtgaagattctgaaccatttagacaacctgttgatttggttgaatatccagactacagagatattatagataccccaatggattttggaacagtaagggaaactctagatgcgggaaattatgacagccctttggagttttgcaaagacatccggctgatatttagcaatgcaaaagcgtatacaccaaacaaaagatcaaagatttatagtatgaccttgagattatctgccttatttgaagaaaaaatgaagaaaatctcttctgattttaaaattggtcaaaaattcaatgaaaaacttcgaagaagccagaggttcaagcaacggcaaaattgtaaaggtgacagtcagcctaacaaaagtatcagaaacctcaagccgaagaggttaaaatctcagacaaaaataattcctgagttggtaggttctcctacccagtctacctcaagtaggacagcttatcttggaacccacaagacaagtgctggtatctcttcaggtgttacttctggtgactcttcagattcagcagaatcatcagaaaggaggaaaagaaatagacctataacaaatggttctacattatctgaaagtgaagtggaagattctttagctacctctttgtcatcgtcagcttccagtagttctgaggaaagcaaagagagttccagagctcgtgaatcctcctcacgcagtgggctatccagaagcagcaatctcagggtaaccagaactagagctgctcaaagaaaaactggtcccgtttcattagcaaatggatgtggcagaaaagccactcgaaagagagtctatttaagtgattctgataacaattcattggagactggtgaaattctaaaagccagagctggaaataaccgaaaagtcttaaggaagtgtgctgctgtggctgccaataaaataaagctaatgagtgatgtagaagagaattctagctctgaaagtgtctgttctggtcggaagctgcctcaccgcaatgcttctgctgtagctagaaaaaagttattacataattctgaagatgaacagagcttaaagtcagaaattgaagaagaggagctaaaagatgaaaatcaacyattaccagtgtccagttctcacactgcccagagcaatgttgatgaatctgaaaacagagactcagagtcagaaagtgatttgcgggtagcccggaaaaattggcatgctaatggttacaagtcccatactccagcaccttcaaagacaaaatttcttaaaatagagtcttctgaggaagactctaaaagtcatgattcagatcatgcatgtaacagaactgctggcccatcaacgtctgtgcagaaacttaaggcagagagcatctcagaggaagcagattctgaaccaggaagatctggtggtaggaaatacaatacatttcacaagaatgcgagtttctttaaaaaaaccaagattctgagtgactcagaagactctgaatctgaagagcaagatagagaagatgggaaatgtcataaaatggaaatgaacccaatttcaggaaatctgaactgtgaccctattgctatgtcccagtgttcctcagatcatggatgtgaaactgatttagattcagatgatgacaaaatagaaaaaccaaacaattttatgaaagattctgcatcacaagacaatggactaagcagaaaaatttccaggaaaagggtctgttccagtgactcagacagtagtttacaggtggttaagaaatcatcaaaagccagaacaggtctcctgaggattactcgaagatgtgcagctacggctgccaataagatcaagctcatgagtgatgtagaagatgtcagtttagaaaatgtgcacactagaagcaaaaatggaaggaaaaaacctctccatcttgcttgtactacagctaagaagaaattgagtgattgtgaaggaagtgtacattgtgaagtaccaagtgaacagtatgcctgtgaaggcaagccacctgatcctgactccgaaggtagtacaaaagtgcttagtcaggctctaaatggagactcagactctgaagatatgttgaattcagaacacaagcacaggcataccaatattcacaaaatagatgcaccttctaaaagaaaaagttcctctgttacatcttcaggagaagattcaaaaagtcatattccagggagtgagactgataggacattttcttcagagtcaaccttggcacaaaaagctactgcagagaataattttgaagtggaactgaattatgggctgcgcaggtggaatggcagaagactcaggacctatggaaaggctccttttagtaagacaaaagtgattcatgattcacaggaaacagcagagaaggaagtaaaaaggaagagatcgcatcctgaattggaaaatgtgaaaatctctgaaacaactgggaattcaaagtttagacctgatactagttccaaatcatcagatttgggatctgtaactgaatcagatattgactgtactgataatacaaaaaccaaaaggaggaaaacgaaaggaaaagcaaaagtagttagaaaaggtaaaacttttacagctaacatatctaaaactgtgagacgtcaaagacaaagcaaacgccctaggttaagtgtggatgataatgactgggaggatttggactatgcaaaatctaaaagagttcttcgacgttcaaaaataaaaacgagaaatcagggtagaaggactgtgagataccatgatggggatgatgacagaagtttagaaaatgtgttagatttcaatggttgcaccttatgaccttgagggaaagccagttcatttaagaggaaatggactggcatttatggtgaaagctggctgttaaaattatttttttgtcttacaattcagggaatatatttatatttttctatgaaaagttatgaatgtgactaaatcatgactgttatttttatttgcacttgctggtctttgtagcagcattcagcacaggtgccaaaatatgcttcattttgggggcagatctattttgacagtatttgactacatatagcaagagtttgaaatatgttaaacactagacatcctggttatcaaaaccaatgagcattactttcatggcagcaagtgtcatgcagttattttctgaatttgtcaaagaggcagtagtttctaacccctgttctatagtagttacaacaatttcacaacctatgtttacagattcttcataaatacatgcatactgacactataatcatgggaggtgtaaccatgattagtaggcgaggtacctaccactttttttttttcttcccctggctacttgagtagaatgcattataccagatctggtcactttcattgaaatggtttctaattttcttcccaagtgctgttgggtttttttcttcttaaggaaaacgttgtcacttttatgttataaacttgaatttataaagtgctggtaaattatttttaatgatttgagtgcatgttttaaacctctaggaccagagcatagtcagagcattttcttttaaattgtgcactaacaaaatgctatataatctgtcttctgtccaagatctcctggtttccattgtaagggatttaaccaaaatcttgctcttccataatcttactctgtgaaatagaggaattcgtgtgccttagatttagaagtgtgttctttaatagagtgtacagggctaaaagagtatttaagttaatatgtaggtttcccccatctgtattccaattgtagaggtgagttttgttaagagtacaattgcaaatcttatctatataggaaaatagctaaatgtcattctccatctctttgttttagtttactgcttccatgtgcaatcctaagcattctttgctggggcaactaaatgtatctttattagtgacttctagtccaaatataagaaactgtcatgttttgtgggaaaataattttataatccatttaaagtgaaagtttatcacacaaatagtacacttattttctaaccaaatacttgataggttatgctactccagtgtagatggccattcctaacttgtttgtgcctgaagatggacttgattcaaatggtttacatatttagtgggtaagggatatgttacagtaccccacctgtaagttatttattagccctaattgtgtttgatttcagacaaaattaacccttttctcctgtgtatctttgaagtggcagataaggtgaagcatcagactggtatcaatattagacaatgttatttattagccctaattgtgtttggtttcagacaaaaccttttctcctgtgtatctttgaagtggcagacaaggcgaacatcagactggtattaatgttagagaatgttctgaagtgttcctattttgtagttatctattccatttgacatagtagaaggtacattttctttctactctgatgcatggggaaggatgtttttggacattatcaactgagataggtgggaaacctcctctcatttgtggcttagagagctatcaccatttcagaactatgatgcttttcttctcagaacttgtgttaagtagatagtaaacagattgattcatgataattgtccttgactaagactgaaaagactaatgggatgccttttactttgctaattttaaaaactggtgatagatgtcaaatccattaatttatttaaactcttcttaaccttctcttttataatctgttctcaggttttaactccatgtttaccatcatttgcaaaaaggtaccaaaaaaatccataaataaatatggaatacattcataagtacatacattcttttggtataaaacaatattttgacagtttaggcttcattaatagaactattctgattatttggactgcattaattggtcattgactggccatccaattaccattttttctttcagtccaaaatagttagacccttgcatacagaagtggtattttggtttttaatcagatttggtttcatcagaagcagcaagaatggacctgatgtctttaaaagcatagccgacaatggtagcttctcaagttatgaaataaaactgagagataatggagaaaataatttttatgggtttttttggttatggtgctattcctaaggttaactttgaatatgtgacacacacactcctaagtacctttaaggaaaattaataaatcattaatagttaaaatgtttacattgagcactagaacatgtttggccttttttttctacgttatgcaaaatgcccagggatttaatgcacaggtgtactttaatgtttagggtcagtttgtagtattcttgagaaaaagataaagggttataatttgaatgtgaactgatccagaaataagtgctgtacctttccactgcacttgaagttcaacttaatggtgtatgtgaaaaacaaaaactactttggttgtgtatgtccaaagtcctatggttttattcatttatggttttacaggctttgaagtactcagatttgatttttgctttcttggaaagactcactttaccaagcatataaaggaaaaatgatttcaaacattgacaagatagatgagtgttaacaaagctttcttttttcgtgtcctccttatttaaaaaggtatacttacaatgtgaagtaacttatgaataaaaggaaaagtttatcccatattcaaataattcctaaggtcagcctccctttttgtaagtggcaaatatctgattaaatcatttctcagtttattaatccttggaaacaatgatatagcagttactcacagcttgtaaattacaacagaaaggttcctttcaaatagtagagctgcacctaaagaggaaattgggtttataagaaaatggaggcaaagaacttaagttttaagaaaaagcacttcaaaacagaagggcaaatggaaaaggggaatataaaacaaaccaataaaaataccatctgagggtgttactgtccaaaagtaaagaataagatgcatcactaagccctttgcactcgttatgacctcgtaagtaaaaattatcacttagaataaggggtgcacactacattccctctgtcttctagacttttttttttgtagaagaatcagaaaacaatttactaacctccctgtttgatattaaaaataggaagaattttaatattttctgttagtacaagttgaacttgattgtgccaactgaaaccccagaggtttgtatatcagtagaatgcaagaacattgttaaaggtgcttacgatcttttttgttttcctttccactccattgtatcaattttttgagtaacttttaaatggctagaaaatggtctttttgctttgcccttttaaagctgaaataaccagctccattcttttcatgaatagtaagttgatatatttatttatcaggtatcttgcagttgtcaccaaatactgtagttttcttatgttgtatggaaattatagttcaattattttaatgtgatggagtgcaacaagtcattgtagaacttttcacctgttaatgttgaagttatacctctgaatttctgctgtggatatcaaggaaataataaagcagaaaccccaagaaatttgcaacttaacagtttgagactgtctcttatcctagtatttgggaagagaaggaataaatttgtcaaaactaggtgagaaaatagagcattgtgggaaaaactgagtccaactagattagcaaatgttaattcctagctcaaactgtgaatagtaaggattgtaaagtatgtaatgctaagggctgtgttgtcttttcttacgattttaagttttaaaggctgttaaattacagagatgttgcccaaggatacatggggattctcaaaagtaagagatttttacctttttcataatctgccaagctggttcctaatatattgttaaattggtagaaaaatatctttaaattggtgtctgctcaagaattgcttttctagatttgatggagggagggggagagtcacatcatttggattctaccaatctgcaggctctatctttggcaacatgtaaataattagactatacatctgtttctcaagtatggcaagaccaatagtttgaatttaattatcaatgctatggtatactttctggtcatattttagttatgtcagttttaaggtaagttttttcatttattaaagcccttaaatgagattttagactgccaaagagaagaggcagtccaattgacctaactgaaatgagatgaccagtatatagagcctagatggactgtagcagctctacccctttgttttacaaggtaaatcattttaaaaattaccttttttgatcagtgggtaaaagttaaagggatctttaatttttgatatattcaagttaattttctaaatgtgaatcagtccttggactgcaactatatattcacctacaaaatcccaatcaaaaaattacatgagcctgtcaagcagatctttagttttccacttcacataagatcgttaatgttctaaattaatctattcatttagatgatttttgtcagttcttaaatgggatataataaatttagcattttcatcttaacaagcaaaagagttaaaaaacaaaacaaaacactactccaagccaaatacattctagctggttaattccagacttgtcccaagtggttccccaacctcttttccactggtaatttcttttcatgcaggcagaatataggggtgcgagcgctgtgagttttacatatgagcttggataggggaactgaagcgagtcaggagccctgctggaaaaggggtttgccattggattgtctgtggcctggtttctttccagtagtacagtaatagggtagattgaaaacaagtatttacttctgattctgcctgcatttagtgtgaaatgctcttaaggtattgcttctaaaaagcaaattaagcagttaagtataaagtccctgaattcatatttcaaaataaggcttttatgagatttttattaaaaattgcaatagccatcacaaatctgagtttttctaggggtgagagaaaactgtattgtgatgagctagattagttgtagttccagaataagaacaaaaattcagagttgtgtggtgcccatcattgagtaaatgaaccctaaaaatgaataagctaatgaactagttcatggaattatttctgatggtcttttgacctgatgctgccatactgcagtgttaccagctccccctagaaaacggaactgtttaaaaacacagcaagttacagaaaccattttattctacagccattggggtacttcagtttatgggatgtttttggaaacttctgctttgggagggatgaagatcattgataaatgttatttgctttctgagttttggggtcatttcattgcttatcaatgaagggcagacagaggagagaatatctcaagtcttttctgataaaaggcttgcttgagggagcttataacttgcacctagagggtttacccactttgtggatttgatttatccaccaaccacagcaaccaataatgtcaagattctaggagtttatgaaagaggctagtatgttttcattttgagtcagacattcttttctcattctcaaatctgttttaaatgctccaattttaaaaatgccaatgaaaattttataatgcttctgtagtaaccatatgcagtttactttgaatttaggaaaacagttttgtatgatgaaatattgtgcagaatctgtaaataaggtagcttaaaaaaaaaaaaaaagtctaattagaatatgattaatccttaaaatgtagaaactagagattgtgttgagtcagaactgttatgtttgtatccaggtttctattcaccacatataccatcttagaatacacacatatctgtgagttataatttaaagtggtcatccagggaaatgatcatggagtgctactacagatgtacagttttacactactgatgtgttcttgccatacccaagtagggaatcacttccaggaaaacaagtcctcaagcactcaatgactttgtaaacccatgactgaaacaagactcatctgaggcagtaggactggtgggattctactgacttcttagtatcacatggcaccatcacaaatgcattgttagagcagcaacatccagagttcttaagcttgtaccctaacacacaaatttgacttctaaccctgaaatatcctatatatatttctaaaactgtttgtagttttcttgagaaaaagcactttataatttactcagttttcagtaataaaattaacactgacttgaatgtatttaaaaaaattctccacagttttgtcttcctcagattgtttttatccttattctctgaaattcctgttttattgtctaagacttaagagattcagctttatcaagttagagtacagtgtaattcaaattctccctcccttgggcatagttactgaagttcaaatttccttaagtattttttaaaaacctgattttagttttttttttcctgcagaatcttaacttttccattattctggatgacaaataaacatttattaaaatgtgttagaattagtatttactaggttcctaaattgtcagtataggtactttgatcacacatcaaaatggaatttctgcaacttaaagcattttgttacaaattgtagttgaaatagaattttatctatttgtctggatgaataggttgttgggaatgaaccagttatctgttcttttcttccaaatgcaaatggtgcagctagttgataatagtatattctcatcctactataaagtgcaaatttcaccttaattttgcatattttaaaatttttgtttaccctttgtagcatatttacattttagcatttgctaacattgatttaatgtgttaaagattcattttggatatagggttgacttgttggagatactagttcataattttaaaattcccaagagaagtgtctttgaagtggtaaacacagtgcactttaagccacttctcttcccacagagtccagctgaaggaggtaagggcatgctgcatgagagtaatgccgtgatgagtgtcttactctggtaaaatgccatttacaatgcctggagactgaacactgaacaaaacatagtgcccttagaatttcactggaaaaacatgtgaatcacataagttagttggcaaaaggaactgatgtgtatgtggtggggttgctttgaataaagtatttcctaacctattctggggagaacgctcaactgatcttagagaagtgtgaaatcagtttcatagacttagggaaaaatctgaagtgcttgcactgtgagggcagaggcctgcctcattagtctagctgtatgaacatgtcagtccacagaagcagtttttacctgtactcatctgcccttcagtcagctttgtgacagaagggcaaacatcttcacagaagaaaaagttcagaaggttggcattggtggtttcattgctacagaataatagtgttacttgatagtatctgactaaaagagctctcattttctagtacttagtagtaaaaagaatgtggtggagtcctccagatgtctagtgtgggtggaggatatcaactggttatttcagtgatctacagccttaccttttgaatgctaaatgtctggaaacttcaggcagggtcctacaaaacaaactgccatcaagattggtgtgtaccatgaaggcagttttagatagtttgactgttcatggctgcaagaaagacctaaaattcaagggcccgtgaacttcagatacgtaaaaggaatatcacttctgttctagaagagtactaattagacttgtttgtgaaatttgaaaatttggctttgagacactggtaacaaacatatctgagccctcctaagtttggtcagcacggagtagtagctctggcatcatgtggctgtgtagagctccagtgtgatttcaagccccctctaaaaactgccttagtctgcatgaagtagttaactctccaaagtgctttttgtctggcaaatcccttcacaattttcacctctcgtctaaaagcttccttaaaggaagccttccttgatcccttaggctaggttaggtttccagtctgtgttctcatagcactctgcactttttggttccttaaagcaactctgtgttattttttagaattttaatctgaatctcgtgtgtcacatacctaggtcagaaaatactggaacaatgaagttaagatttagtaattcaaattatgtaaaatgctcatatatatgtttttagattagcagctttatgatgccgatgctgaaggaacttttcaccccattcttacaagtctgctactgttttaagtgacatccttatagttgtagataagcaaatgtaaggttatatcaatgtgaagaagcccttagtatcacattttaaaatttatcatttagcaatatgacttttaaatttattgtttccgaatgagtgttgttgaggaatgttagcagtagtaaaatcttgtgttacaagatttttgcatttacatgaactttcactcatttttcagaatttgttcctagagacagagaacccaatacaaaagtgagaacatgtatgcataatcagaaggatgcagtgcagatgcctagtgaaactctgaaagcaaaaatggtacctgagaaagttccccgcagatgtgctactgttgctgcaaataaaataaagataatgagtaatctaaaagaaacgatctcaggaccagaaaatgtctggattaggaagagtagcagaaaactgccccatcgaaatgcttctgctgcggctaagaaaaaattactgaatgtttataaagaggatgatacaaccataaattctgaaagtgaaaaagagctagaagatattaatagaaaaatgctttttttaagggggttcagatcctggaaagaaaatgcacaatagtgactatgagaatgtagaagtggcatctgaaaacaattggtacacaagtaaactggcagttacattctgctcccagctctaaaattactcccttattggcatctttggaggaattttctaaaagccataatccagtgggttcctcccagtcagctcttgtacagacatgtgctctggggaattctgaggaggaaataaattgcagagtctgtaggtggagaggtggaaagaaaagacaaatggcctgctataagactactattcctttccagaatgcaaggccttgaagacatgattccttagaggaagaatataatgggaagtgtacaggctaggaagaacttgaagtgaacaaatttcaaaatcttaacctgatgctaattttcagggttctccattacagtgtaaaaattcagaccacgacaactatggtgtcatgaggaaaaaaaatcaggcatttttccaaaggaagtgctaatgggcctatttgacttctgagtgaagcaaaaactacccagatccattccctacaattcacatccccaaaggtcaaaaacaaactaggaggacctgggaatttcagctggagatactgattattgagttctgaagtagagtgttggaaataggcaattagagaaagtccattgatgtcattttgtttataatattgcagttcatactgaatgaccacttgatatgactaattcagggaatatatatttttctatgaaagctatgaatgttactatcacggcttttccttatttttacttgtatgtagcagcatttacagaaatgccaaaaatgtgcctcattaagaggcaggtcttaatcagttagataaaaataaaatgtatagcttaagatcaaaacagtcatatttttagatacagtgaaatcttttatgtttctctacagcaccttaaaaattagaacttgaatactttgagtaaacttactacaatctcatcccaacaaactttaatggtagcatgtttggcctatttcattgtggcctgtactaggattagaaaatttggtcgtggtataacaaagaagtgtatttacaataggatttaatttgttgttaatatgtatttgttgaaattaaaattgccagattaaatgaatatactgtcgcatctttttaacatagtaacgtgttactggaaaaattaagttgttgaaagtaagttgttttcccatttaaaaatatctgaatatatgatttgcatgtgtaaatctgaaaaactaaactacagaaacctagggttttctatttcttttttaagtcaaatgcatttttttttttgttatacagatgaaccaagtgtctaaaatacttgagaaatttgtggttgcatgtctgttttaaaaaaaaggctttttgttttttagcataagccagaatattctaacctactaagtctgtgtcctttgctccttttgtagtatactttcatctaaattactgatcccaatatgttgatacacaggtgagaaggaagaattcctaataaactgctattacttttaggtgcatggggtttgatttttgagctctaatgaaatgcttaaacttctttccagttcaaattttacacttaatttataatatttattgagtatattatgtcctcaacaagtaactataaaatgaaatacttaactcggtgaagactattttatgcaaagtttttttttttttttttttttttttttagcaatttcagtgtaatgaaagaatttaagctttgaatttataatttgctgtggtggggttaatttctgtcagtatttgagattgtattatcagtcttgcataatgaaatccttttttggctaagtatttaattcgaacatatttgcctttttaaaaagtgcttggcctaaacttattgtaactgcatgaaataagcatttgcttaaaacttaacattgtaaaattgttctctctgaaatgtgtgcagaatttaaatcatggccaaatgtattactattaccctatttacagtaatttgctttgcagaaaatatttcttcatcatggaactgtgaaatcaaattgaagatcttactggtaaaaatgacaaattaacaaaaggactaagacaagtggtgcccaaacaacctttttattctgcagttccatcatcataatagaccagttaacccaggagtcctaatgttttaaaacatcattgtggtgatcttgtttattctatctcactaaggatatccagtttcctaagctcttactggctagcaatttcgtcttaattttattgctaaatgttcaaattttgcttccaaactcactttatttttgcagatgtgtacatctgctaaatactaattttatgtaaatgattttgttgattatctttccacatcttaaaatgtttctaacagctttgagattttatctcaacaggctctctctgaccccaaagtagtacttaccttcgtgactactgacaaagtcacaaaatgcaggcgatgtcatgtatttcggtacaactaaatctaggaaacggttttttcattgcattactgcatattttcattttcatttaaattatgtcccctttttctcttgcttgaaacagtgctcctcgaactttgtcttccagcacattttaaagagaaccaattaaagaacaatcacacattctgcttattaaaggctatttaaaaagaaacattttgtattagaaaatggccaactttaaaacactattttttacactcataaaaatgttttttaaatcgccttgacaatcatcagcttttgaaatgtgaattcctattgccagagtaaaggtctcgtttttatacca

SEQ ID NO: 19 - DNA, 20017 bp, Homo sapien
caaaatagacggggacatgttacagtaggttagaagatcaacagtgctatggaggaaaagaacacaggaagagtaaaagagaaatgggcacagagtgaggataagtttaaattgtacttagggtggttagggaaggtctcactgaaaatgtgacatttgagccaagacttgaaggaggggagggactcagccatgcagtttttccaggagaagagcattcctgcagaacaaacagcaagtacaaataccctgaggcagccgtgggccaggtcacgccacagtgaggctggagcactatgagaaggggagcagtcaggtgagaggtaagacaaaccagagagaggccagatcgtgtggacttggccttttcctctgggtctgatgggagcctctggaggattttgagagaggaaggacaagtccgtctttagtttgtttttttttttttcttgagatggagtttcgctctcgttgcccaggctggagtacaatggctcgatctcggctcactgcaacctccacctcctgggttcaggcaattctcctgcctcagcctcctgagtagctgggattacaagcacacgccaccatacccggctaatttttgtatttttagtagagacagggtttcactgtgttggtcaggctggtctcaaactcctgacctcaggtaatccacctgccccggcctcccaaagtgctgggattacaggcatgagccactacgcctggccctgtcttaagttttaacaggatccctccagctgcctgagaatacacagaaataggatgaaggtagaagcagtaagacataagaggttgtggtgctcttccggatgagaagtgcttagattctggatacattttgaagagctgtacttccttatcgcccggtacctatcggcgggcccgtgtcggagagcggcccaggtgctggtgcaggagctggagcagtaccagttgttgccgaagagattggactgggagggcaacgagcacaacaggagctacgaggagttggtcttgtccaataagcatgtggctcctgatcatcttttgcaaatctgccagcgcatcggtcctatgttggataaagaaattccacccagtatttcaagagtcacttctttacttggtgcaggaaggcagtctttgctacgtacagcaaaagactgcaggcacacagtttggaagggctctgcctttgctgctcttcatagaggaagacctcctgaaatgccagtgaattatggttccccaccaaatcttgtggagatacatcgaggaaaacaactcacagggtgttccacttttagtacagcatttccaggaactatgtatcagcatataaaaatgcacagaaggattctcggacatctatctgctgtttactgtgtagcatttgataggacaggacatagaatctttacaggttcagatgactgtttggtaaagatttggtcaacacataatggccgcttgttatctacattaagaggtcattctgcagaaatttcagatatggcagtaaactatgagaatacaatgattgctgcggggagctgtgataaaattattagagtgtggtgcttgagaacttgtgccccagttgctgtgctccaaggacacacaggatcaattacatctttacagtttagcccgatggccaaaggctctcaaagatacatggtttccactggtgctgatgggacagtttgcttttggcaatgggatttagaatccttaaaatttagcccacgtcccctgaagttcactgaaaagcctaggccaggcgttcaaatgctttgttcttcttttagtgttggtggtatgtttttagccacaggtagtactgatcatgtaatcagaatgtattttttgggttttgaagcacccgaaaaaatcgcagaacttgaaagccacactgataaagtagatagtatccaattttgtaacaatggtgatcggttcctaagtggtagcagagatggaacagcacggatttggagatttgagcagttagaatggaggagcattttattggatatggctaccagaatctcaggggacttatcttccgaagaggaaaggtttatgaaacctaaagtaacaatgatagcttggaatcaaaatgatagcattgttgtcacagctgtgaatgatcatgtcctcaaagtgtggaattcttacactggacaactgcttcataacttaatggtaggtaatttctggtacaatgtaacaaatgagattttttgaaatatgattgtaattttgaagctataaaaataatatattgaacaagttgtttctctcatgtaaactatgaaatgattagaaatttttataattataaattattgtcgaatacatttctaaaagtatatgctgtaacagtatgtatttttaaattttcaatttgtaacttgtaaaccctccttaatgttatgactttgttaaataaagggacatgctgatgaagtatttgttctggagacacatccctttgattccagaattatgttatctgcaggacatgatggcagcatatttatatgggatattacaaaaggtaccaagatgaaacattattttaatatgattgaaggacaaggacatggagctgtgtttgactgtaagttttcacaggatggacagcattttgcctgtacagattctcatgggcaccttctgatatttggttttggatgcagcaaaccatatgaaaagattcctgatcagatgttcttccatactgactatcgaccacttattagagattctaataattatgtcttagatgagcaaactcagcaggctcctcatcttatgcctccaccattcttggtagatgtagatggaaatcctcatccaaccaagtatcagagattagtaccaggccgagaaaattctgcagatgaacatttgattccacagctgggctatgtggcaacaagtgatggagaggtgattgaacaaattataagcctgcaaaccaatgataatgatgaacgcagcccagaatcgagtattcttgatggaatgataagacagttgcagcagcagcaagatcagagaatgggagcagatcaggatactattccaagaggactttcaaatggtgaagaaacaccccggagaggttttagaaggctgagcttagacattcagtcccctccaaatattggtctgcgtcgtagtggacaagttgaaggtgttcgtcagatgcatcaaaacgctccacgcagtcagattgctacagaacgtgacctgcaggcttggaaacgaagagtggttgtaccagaggtaccactaggcatatttaggaagctggaagacttccgattagagaaaggtgaagaggaaagaaatctttatataataggaagaaaaagaaagactcttcagctctcacataagtcggattcagtggttttggtatcacagtctagacaaaggacatgtaggcgtaaatatccaaattatggtagaagaaatcgtagctggcgtgagttatcttctggaaatgagtcttcaagctctgtaagacatgagacttcctgtgatcagagtgaaggttctggttcttcagaagaggatgaatggagaagtgacagaaaaagtgagagttacagcgaaagttcaagtgactcttcatctagatattccgattggacagctgatgcgggcatcaatttgcagcctcctttaagaacatcatgtcgtcgacgaattactcgattttgtagtagttcagaagatgaaatatctactgagaatttatctcctccaaaaagaagacgaaagagaaagaaagaaaataagcctaagaaggagaatttgcggaggatgactccagcagagcttgcaaatatggagcatttatatgaatttcaccctccagtttggattactgacaccacacttagaaaatctccttttgttcctcaaatgggtgatgaggtaatatattttcgacagggtcatgaagcttatattgaggctgtaagaagaaataatatttatgaactgaaccctaataaggagccatggagaaaaatggatcttaggtatcagagaagcagacactggggggaaggttgactatggcaaatccatttgatggatactccatccaggatcaagaattggttaaaatagttggaatacgatatgaagttgggccccctacactctgttgcctaaaactagcatttatagatccagcaactggaaaacttatggacaaatctttctctattagatatcatgatatgccagatgttattgactttcttgtattgcgtcaattttatgatgaagcaagacagaggaattggcagtcttgtgacagattccgctctattattgatgatgcttggtggtttggaacagtgttaagtcaagagccatatcaaccacagtatcctgatagtcatttccagtgttatattgttaggtgggataatactgaaattgaaaaacttagcccatgggacatggaaccaattcctgataatgttgatccacctgaagaattaggagctagtatttctgtcacaacagatgagctagagaaattgctctataaaccacaagctggtgaatggggtcagaaatcaagagatgaagaatgtgatagaattatcagtggtatagatcaacttttgaatcttgatatagcagcagcttttgcaggccctgttgatttgtgtacatacccgaagtactgtactgtagtagcttatccaaccgatctttacacaattcgaatgagacttgttaatcgattttacaggaggctgtctgcgttagtttgggaagtcagatatatagaacataatgccagaacatttaacgaacctgagagtgtaattgcaagatcagctaaaaagataactgaccaacttttaaaatttatcaagaatcaacactgtacaaatatctcagaactttctaacacatctgaaaatgatgagcaaaatgctgaggatttggatgatagtgatcttcctaaaacatcttctggaagaaggagagtccatgatgggaaaaaaagcatcagagctacgaactatgttgaaagcaactggaagaaacagtgtaaggaactagtgaacttaatttttcagtgtgaagattctgaaccatttagacaacctgttgatttggttgaatatccagactacagagatattatagataccccaatggattttggaacagtaagggaaactctagatgcgggaaattatgacagccctttggagttttgcaaagacatccggctgatatttagcaatgcaaaagcgtatacaccaaacaaaagatcaaagatttatagtatgaccttgagattatctgccttatttgaagaaaaaatgaagaaaatctcttctgattttaaaattggtcaaaaattcaatgaaaaacttcgaagaagccagaggttcaagcaacggcaaaattgtaaaggtgacagtcagcctaacaaaagtatcagaaacctcaagccgaagaggttaaaatctcagacaaaaataattcctgagttggtaggttctcctacccagtctacctcaagtaggacagcttatcttggaacccacaagacaagtgctggtatctcttcaggtgttacttctggtgactcttcagattcagcagaatcatcagaaaggaggaaaagaaatagacctataacaaatggttctacattatctgaaagtgaagtggaagattctttagctacctctttgtcatcgtcagcttccagtagttctgaggaaagcaaagagagttccagagctcgtgaatcctcctcacgcagtgggctatccagaagcagcaatctcagggtaaccagaactagagctgctcaaagaaaaactggtcccgtttcattagcaaatggatgtggcagaaaagccactcgaaagagagtctatttaagtgattctgataacaattcattggagactggtgaaattctaaaagccagagctggaaataaccgaaaagtcttaaggaagtgtgctgctgtggctgccaataaaataaagctaatgagtgatgtagaagagaattctagctctgaaagtgtctgttctggtcggaagctgcctcaccgcaatgcttctgctgtagctagaaaaaagttattacataattctgaagatgaacagagcttaaagtcagaaattgaagaagaggagctaaaagatgaaaatcaacyattaccagtgtccagttctcacactgcccagagcaatgttgatgaatctgaaaacagagactcagagtcagaaagtgatttgcgggtagcccggaaaaattggcatgctaatggttacaagtcccatactccagcaccttcaaagacaaaatttcttaaaatagagtcttctgaggaagactctaaaagtcatgattcagatcatgcatgtaacagaactgctggcccatcaacgtctgtgcagaaacttaaggcagagagcatctcagaggaagcagattctgaaccaggaagatctggtggtaggaaatacaatacatttcacaagaatgcgagtttctttaaaaaaaccaagattctgagtgactcagaagactctgaatctgaagagcaagatagagaagatgggaaatgtcataaaatggaaatgaacccaatttcaggaaatctgaactgtgaccctattgctatgtcccagtgttcctcagatcatggatgtgaaactgatttagattcagatgatgacaaaatagaaaaaccaaacaattttatgaaagattctgcatcacaagacaatggactaagcagaaaaatttccaggaaaagggtctgttccagtgactcagacagtagtttacaggtggttaagaaatcatcaaaagccagaacaggtctcctgaggattactcgaagatgtgcagctacggctgccaataagatcaagctcatgagtgatgtagaagatgtcagtttagaaaatgtgcacactagaagcaaaaatggaaggaaaaaacctctccatcttgcttgtactacagctaagaagaaattgagtgattgtgaaggaagtgtacattgtgaagtaccaagtgaacagtatgcctgtgaaggcaagccacctgatcctgactccgaaggtagtacaaaagtgcttagtcaggctctaaatggagactcagactctgaagatatgttgaattcagaacacaagcacaggcataccaatattcacaaaatagatgcaccttctaaaagaaaaagttcctctgttacatcttcaggagaagattcaaaaagtcatattccagggagtgagactgataggacattttcttcagagtcaaccttggcacaaaaagctactgcagagaataattttgaagtggaactgaattatgggctgcgcaggtggaatggcagaagactcaggacctatggaaaggctccttttagtaagacaaaagtgattcatgattcacaggaaacagcagagaaggaagtaaaaaggaagagatcgcatcctgaattggaaaatgtgaaaatctctgaaacaactgggaattcaaagtttagacctgatactagttccaaatcatcagatttgggatctgtaactgaatcagatattgactgtactgataatacaaaaaccaaaaggaggaaaacgaaaggaaaagcaaaagtagttagaaaaggtaaaacttttacagctaacatatctaaaactgtgagacgtcaaagacaaagcaaacgccctaggttaagtgtggatgataatgactgggaggatttggactatgcaaaatctaaaagagttcttcgacgttcaaaaataaaaacgagaaatcagggtagaaggactgtgagataccatgatggggatgatgacagaagtttagaaaatgtgttagatttcaatggttgcaccttatgaccttgagggaaagccagttcatttaagaggaaatggactggcatttatggtgaaagctggctgttaaaattatttttttgtcttacaattcagggaatatatttatatttttctatgaaaagttatgaatgtgactaaatcatgactgttatttttatttgcacttgctggtctttgtagcagcattcagcacaggtgccaaaatatgcttcattttgggggcagatctattttgacagtatttgactacatatagcaagagtttgaaatatgttaaacactagacatcctggttatcaaaaccaatgagcattactttcatggcagcaagtgtcatgcagttattttctgaatttgtcaaagaggcagtagtttctaacccctgttctatagtagttacaacaatttcacaacctatgtttacagattcttcataaatacatgcatactgacactataatcatgggaggtgtaaccatgattagtaggcgaggtacctaccactttttttttttcttcccctggctacttgagtagaatgcattataccagatctggtcactttcattgaaatggtttctaattttcttcccaagtgctgttgggtttttttcttcttaaggaaaacgttgtcacttttatgttataaacttgaatttataaagtgctggtaaattatttttaatgatttgagtgcatgttttaaacctctaggaccagagcatagtcagagcattttcttttaaattgtgcactaacaaaatgctatataatctgtcttctgtccaagatctcctggtttccattgtaagggatttaaccaaaatcttgctcttccataatcttactctgtgaaatagaggaattcgtgtgccttagatttagaagtgtgttctttaatagagtgtacagggctaaaagagtatttaagttaatatgtaggtttcccccatctgtattccaattgtagaggtgagttttgttaagagtacaattgcaaatcttatctatataggaaaatagctaaatgtcattctccatctctttgttttagtttactgcttccatgtgcaatcctaagcattctttgctggggcaactaaatgtatctttattagtgacttctagtccaaatataagaaactgtcatgttttgtgggaaaataattttataatccatttaaagtgaaagtttatcacacaaatagtacacttattttctaaccaaatacttgataggttatgctactccagtgtagatggccattcctaacttgtttgtgcctgaagatggacttgattcaaatggtttacatatttagtgggtaagggatatgttacagtaccccacctgtaagttatttattagccctaattgtgtttgatttcagacaaaattaacccttttctcctgtgtatctttgaagtggcagataaggtgaagcatcagactggtatcaatattagacaatgttatttattagccctaattgtgtttggtttcagacaaaaccttttctcctgtgtatctttgaagtggcagacaaggcgaacatcagactggtattaatgttagagaatgttctgaagtgttcctattttgtagttatctattccatttgacatagtagaaggtacattttctttctactctgatgcatggggaaggatgtttttggacattatcaactgagataggtgggaaacctcctctcatttgtggcttagagagctatcaccatttcagaactatgatgcttttcttctcagaacttgtgttaagtagatagtaaacagattgattcatgataattgtccttgactaagactgaaaagactaatgggatgccttttactttgctaattttaaaaactggtgatagatgtcaaatccattaatttatttaaactcttcttaaccttctcttttataatctgttctcaggttttaactccatgtttaccatcatttgcaaaaaggtaccaaaaaaatccataaataaatatggaatacattcataagtacatacattcttttggtataaaacaatattttgacagtttaggcttcattaatagaactattctgattatttggactgcattaattggtcattgactggccatccaattaccattttttctttcagtccaaaatagttagacccttgcatacagaagtggtattttggtttttaatcagatttggtttcatcagaagcagcaagaatggacctgatgtctttaaaagcatagccgacaatggtagcttctcaagttatgaaataaaactgagagataatggagaaaataatttttatgggtttttttggttatggtgctattcctaaggttaactttgaatatgtgacacacacactcctaagtacctttaaggaaaattaataaatcattaatagttaaaatgtttacattgagcactagaacatgtttggccttttttttctacgttatgcaaaatgcccagggatttaatgcacaggtgtactttaatgtttagggtcagtttgtagtattcttgagaaaaagataaagggttataatttgaatgtgaactgatccagaaataagtgctgtacctttccactgcacttgaagttcaacttaatggtgtatgtgaaaaacaaaaactactttggttgtgtatgtccaaagtcctatggttttattcatttatggttttacaggctttgaagtactcagatttgatttttgctttcttggaaagactcactttaccaagcatataaaggaaaaatgatttcaaacattgacaagatagatgagtgttaacaaagctttcttttttcgtgtcctccttatttaaaaaggtatacttacaatgtgaagtaacttatgaataaaaggaaaagtttatcccatattcaaataattcctaaggtcagcctccctttttgtaagtggcaaatatctgattaaatcatttctcagtttattaatccttggaaacaatgatatagcagttactcacagcttgtaaattacaacagaaaggttcctttcaaatagtagagctgcacctaaagaggaaattgggtttataagaaaatggaggcaaagaacttaagttttaagaaaaagcacttcaaaacagaagggcaaatggaaaaggggaatataaaacaaaccaataaaaataccatctgagggtgttactgtccaaaagtaaagaataagatgcatcactaagccctttgcactcgttatgacctcgtaagtaaaaattatcacttagaataaggggtgcacactacattccctctgtcttctagacttttttttttgtagaagaatcagaaaacaatttactaacctccctgtttgatattaaaaataggaagaattttaatattttctgttagtacaagttgaacttgattgtgccaactgaaaccccagaggtttgtatatcagtagaatgcaagaacattgttaaaggtgcttacgatcttttttgttttcctttccactccattgtatcaattttttgagtaacttttaaatggctagaaaatggtctttttgctttgcccttttaaagctgaaataaccagctccattcttttcatgaatagtaagttgatatatttatttatcaggtatcttgcagttgtcaccaaatactgtagttttcttatgttgtatggaaattatagttcaattattttaatgtgatggagtgcaacaagtcattgtagaacttttcacctgttaatgttgaagttatacctctgaatttctgctgtggatatcaaggaaataataaagcagaaaccccaagaaatttgcaacttaacagtttgagactgtctcttatcctagtatttgggaagagaaggaataaatttgtcaaaactaggtgagaaaatagagcattgtgggaaaaactgagtccaactagattagcaaatgttaattcctagctcaaactgtgaatagtaaggattgtaaagtatgtaatgctaagggctgtgttgtcttttcttacgattttaagttttaaaggctgttaaattacagagatgttgcccaaggatacatggggattctcaaaagtaagagatttttacctttttcataatctgccaagctggttcctaatatattgttaaattggtagaaaaatatctttaaattggtgtctgctcaagaattgcttttctagatttgatggagggagggggagagtcacatcatttggattctaccaatctgcaggctctatctttggcaacatgtaaataattagactatacatctgtttctcaagtatggcaagaccaatagtttgaatttaattatcaatgctatggtatactttctggtcatattttagttatgtcagttttaaggtaagttttttcatttattaaagcccttaaatgagattttagactgccaaagagaagaggcagtccaattgacctaactgaaatgagatgaccagtatatagagcctagatggactgtagcagctctacccctttgttttacaaggtaaatcattttaaaaattaccttttttgatcagtgggtaaaagttaaagggatctttaatttttgatatattcaagttaattttctaaatgtgaatcagtccttggactgcaactatatattcacctacaaaatcccaatcaaaaaattacatgagcctgtcaagcagatctttagttttccacttcacataagatcgttaatgttctaaattaatctattcatttagatgatttttgtcagttcttaaatgggatataataaatttagcattttcatcttaacaagcaaaagagttaaaaaacaaaacaaaacactactccaagccaaatacattctagctggttaattccagacttgtcccaagtggttccccaacctcttttccactggtaatttcttttcatgcaggcagaatataggggtgcgagcgctgtgagttttacatatgagcttggataggggaactgaagcgagtcaggagccctgctggaaaaggggtttgccattggattgtctgtggcctggtttctttccagtagtacagtaatagggtagattgaaaacaagtatttacttctgattctgcctgcatttagtgtgaaatgctcttaaggtattgcttctaaaaagcaaattaagcagttaagtataaagtccctgaattcatatttcaaaataaggcttttatgagatttttattaaaaattgcaatagccatcacaaatctgagtttttctaggggtgagagaaaactgtattgtgatgagctagattagttgtagttccagaataagaacaaaaattcagagttgtgtggtgcccatcattgagtaaatgaaccctaaaaatgaataagctaatgaactagttcatggaattatttctgatggtcttttgacctgatgctgccatactgcagtgttaccagctccccctagaaaacggaactgtttaaaaacacagcaagttacagaaaccattttattctacagccattggggtacttcagtttatgggatgtttttggaaacttctgctttgggagggatgaagatcattgataaatgttatttgctttctgagttttggggtcatttcattgcttatcaatgaagggcagacagaggagagaatatctcaagtcttttctgataaaaggcttgcttgagggagcttataacttgcacctagagggtttacccactttgtggatttgatttatccaccaaccacagcaaccaataatgtcaagattctaggagtttatgaaagaggctagtatgttttcattttgagtcagacattcttttctcattctcaaatctgttttaaatgctccaattttaaaaatgccaatgaaaattttataatgcttctgtagtaaccatatgcagtttactttgaatttaggaaaacagttttgtatgatgaaatattgtgcagaatctgtaaataaggtagcttaaaaaaaaaaaaaaagtctaattagaatatgattaatccttaaaatgtagaaactagagattgtgttgagtcagaactgttatgtttgtatccaggtttctattcaccacatataccatcttagaatacacacatatctgtgagttataatttaaagtggtcatccagggaaatgatcatggagtgctactacagatgtacagttttacactactgatgtgttcttgccatacccaagtagggaatcacttccaggaaaacaagtcctcaagcactcaatgactttgtaaacccatgactgaaacaagactcatctgaggcagtaggactggtgggattctactgacttcttagtatcacatggcaccatcacaaatgcattgttagagcagcaacatccagagttcttaagcttgtaccctaacacacaaatttgacttctaaccctgaaatatcctatatatatttctaaaactgtttgtagttttcttgagaaaaagcactttataatttactcagttttcagtaataaaattaacactgacttgaatgtatttaaaaaaattctccacagttttgtcttcctcagattgtttttatccttattctctgaaattcctgttttattgtctaagacttaagagattcagctttatcaagttagagtacagtgtaattcaaattctccctcccttgggcatagttactgaagttcaaatttccttaagtattttttaaaaacctgattttagttttttttttcctgcagaatcttaacttttccattattctggatgacaaataaacatttattaaaatgtgttagaattagtatttactaggttcctaaattgtcagtataggtactttgatcacacatcaaaatggaatttctgcaacttaaagcattttgttacaaattgtagttgaaatagaattttatctatttgtctggatgaataggttgttgggaatgaaccagttatctgttcttttcttccaaatgcaaatggtgcagctagttgataatagtatattctcatcctactataaagtgcaaatttcaccttaattttgcatattttaaaatttttgtttaccctttgtagcatatttacattttagcatttgctaacattgatttaatgtgttaaagattcattttggatatagggttgacttgttggagatactagttcataattttaaaattcccaagagaagtgtctttgaagtggtaaacacagtgcactttaagccacttctcttcccacagagtccagctgaaggaggtaagggcatgctgcatgagagtaatgccgtgatgagtgtcttactctggtaaaatgccatttacaatgcctggagactgaacactgaacaaaacatagtgcccttagaatttcactggaaaaacatgtgaatcacataagttagttggcaaaaggaactgatgtgtatgtggtggggttgctttgaataaagtatttcctaacctattctggggagaacgctcaactgatcttagagaagtgtgaaatcagtttcatagacttagggaaaaatctgaagtgcttgcactgtgagggcagaggcctgcctcattagtctagctgtatgaacatgtcagtccacagaagcagtttttacctgtactcatctgcccttcagtcagctttgtgacagaagggcaaacatcttcacagaagaaaaagttcagaaggttggcattggtggtttcattgctacagaataatagtgttacttgatagtatctgactaaaagagctctcattttctagtacttagtagtaaaaagaatgtggtggagtcctccagatgtctagtgtgggtggaggatatcaactggttatttcagtgatctacagccttaccttttgaatgctaaatgtctggaaacttcaggcagggtcctacaaaacaaactgccatcaagattggtgtgtaccatgaaggcagttttagatagtttgactgttcatggctgcaagaaagacctaaaattcaagggcccgtgaacttcagatacgtaaaaggaatatcacttctgttctagaagagtactaattagacttgtttgtgaaatttgaaaatttggctttgagacactggtaacaaacatatctgagccctcctaagtttggtcagcacggagtagtagctctggcatcatgtggctgtgtagagctccagtgtgatttcaagccccctctaaaaactgccttagtctgcatgaagtagttaactctccaaagtgctttttgtctggcaaatcccttcacaattttcacctctcgtctaaaagcttccttaaaggaagccttccttgatcccttaggctaggttaggtttccagtctgtgttctcatagcactctgcactttttggttccttaaagcaactctgtgttattttttagaattttaatctgaatctcgtgtgtcacatacctaggtcagaaaatactggaacaatgaagttaagatttagtaattcaaattatgtaaaatgctcatatatatgtttttagattagcagctttatgatgccgatgctgaaggaacttttcaccccattcttacaagtctgctactgttttaagtgacatccttatagttgtagataagcaaatgtaaggttatatcaatgtgaagaagcccttagtatcacattttaaaatttatcatttagcaatatgacttttaaatttattgtttccgaatgagtgttgttgaggaatgttagcagtagtaaaatcttgtgttacaagatttttgcatttacatgaactttcactcatttttcagaatttgttcctagagacagagaacccaatacaaaagtgagaacatgtatgcataatcagaaggatgcagtgcagatgcctagtgaaactctgaaagcaaaaatggtacctgagaaagttccccgcagatgtgctactgttgctgcaaataaaataaagataatgagtaatctaaaagaaacgatctcaggaccagaaaatgtctggattaggaagagtagcagaaaactgccccatcgaaatgcttctgctgcggctaagaaaaaattactgaatgtttataaagaggatgatacaaccataaattctgaaagtgaaaaagagctagaagatattaatagaaaaatgctttttttaagggggttcagatcctggaaagaaaatgcacaatagtgactatgagaatgtagaagtggcatctgaaaacaattggtacacaagtaaactggcagttacattctgctcccagctctaaaattactcccttattggcatctttggaggaattttctaaaagccataatccagtgggttcctcccagtcagctcttgtacagacatgtgctctggggaattctgaggaggaaataaattgcagagtctgtaggtggagaggtggaaagaaaagacaaatggcctgctataagactactattcctttccagaatgcaaggccttgaagacatgattccttagaggaagaatataatgggaagtgtacaggctaggaagaacttgaagtgaacaaatttcaaaatcttaacctgatgctaattttcagggttctccattacagtgtaaaaattcagaccacgacaactatggtgtcatgaggaaaaaaaatcaggcatttttccaaaggaagtgctaatgggcctatttgacttctgagtgaagcaaaaactacccagatccattccctacaattcacatccccaaaggtcaaaaacaaactaggaggacctgggaatttcagctggagatactgattattgagttctgaagtagagtgttggaaataggcaattagagaaagtccattgatgtcattttgtttataatattgcagttcatactgaatgaccacttgatatgactaattcagggaatatatatttttctatgaaagctatgaatgttactatcacggcttttccttatttttacttgtatgtagcagcatttacagaaatgccaaaaatgtgcctcattaagaggcaggtcttaatcagttagataaaaataaaatgtatagcttaagatcaaaacagtcatatttttagatacagtgaaatcttttatgtttctctacagcaccttaaaaattagaacttgaatactttgagtaaacttactacaatctcatcccaacaaactttaatggtagcatgtttggcctatttcattgtggcctgtactaggattagaaaatttggtcgtggtataacaaagaagtgtatttacaataggatttaatttgttgttaatatgtatttgttgaaattaaaattgccagattaaatgaatatactgtcgcatctttttaacatagtaacgtgttactggaaaaattaagttgttgaaagtaagttgttttcccatttaaaaatatctgaatatatgatttgcatgtgtaaatctgaaaaactaaactacagaaacctagggttttctatttcttttttaagtcaaatgcatttttttttttgttatacagatgaaccaagtgtctaaaatacttgagaaatttgtggttgcatgtctgttttaaaaaaaaggctttttgttttttagcataagccagaatattctaacctactaagtctgtgtcctttgctccttttgtagtatactttcatctaaattactgatcccaatatgttgatacacaggtgagaaggaagaattcctaataaactgctattacttttaggtgcatggggtttgatttttgagctctaatgaaatgcttaaacttctttccagttcaaattttacacttaatttataatatttattgagtatattatgtcctcaacaagtaactataaaatgaaatacttaactcggtgaagactattttatgcaaagtttttttttttttttttttttttttttagcaatttcagtgtaatgaaagaatttaagctttgaatttataatttgctgtggtggggttaatttctgtcagtatttgagattgtattatcagtcttgcataatgaaatccttttttggctaagtatttaattcgaacatatttgcctttttaaaaagtgcttggcctaaacttattgtaactgcatgaaataagcatttgcttaaaacttaacattgtaaaattgttctctctgaaatgtgtgcagaatttaaatcatggccaaatgtattactattaccctatttacagtaatttgctttgcagaaaatatttcttcatcatggaactgtgaaatcaaattgaagatcttactggtaaaaatgacaaattaacaaaaggactaagacaagtggtgcccaaacaacctttttattctgcagttccatcatcataatagaccagttaacccaggagtcctaatgttttaaaacatcattgtggtgatcttgtttattctatctcactaaggatatccagtttcctaagctcttactggctagcaatttcgtcttaattttattgctaaatgttcaaattttgcttccaaactcactttatttttgcagatgtgtacatctgctaaatactaattttatgtaaatgattttgttgattatctttccacatcttaaaatgtttctaacagctttgagattttatctcaacaggctctctctgaccccaaagtagtacttaccttcgtgactactgacaaagtcacaaaatgcaggcgatgtcatgtatttcggtacaactaaatctaggaaacggttttttcattgcattactgcatattttcattttcatttaaattatgtcccctttttctcttgcttgaaacagtgctcctcgaactttgtcttccagcacattttaaagagaaccaattaaagaacaatcacacattctgcttattaaaggctatttaaaaagaaacattttgtattagaaaatggccaactttaaaacactattttttacactcataaaaatgttttttaaatcgccttgacaatcatcagcttttgaaatgtgaattcctattgccagagtaaaggtctcgtttttatacca

SEQ ID NO: 20 - DNA, 19242 bp, Homo sapien
ggtccaggcggcgcgcacggtatggcggcggcggcggcggcggcggcggcgcgcgcctgagaagaggggacgccagcccggtcaggcctcggcgcggcctacacgctccgctcgctcgctcgctcccgcctcccgccccgcgcccggccatggcggagccgtcgtccgcccgacgcccggtgcctctcatcgagtcggagctgtacttccttatcgcccggtacctatcggcgggcccgtgtcggagagcggcccaggtgctggtgcaggagctggagcagtaccagttgttgccgaagagattggactgggagggcaacgagcacaacaggagctacgaggagttggtcttgtccaataagcatgtggctcctgatcatcttttgcaaatctgccagcgcatcggtcctatgttggataaagaaattccacccagtatttcaagagtcacttctttacttggtgcaggaaggcagtctttgctacgtacagcaaaagactgcaggcacacagtttggaagggctctgcctttgctgctcttcatagaggaagacctcctgaaatgccagtgaattatggttccccaccaaatcttgtggagatacatcgaggaaaacaactcacagggtgttccacttttagtacagcatttccaggaactatgtatcagcatataaaaatgcacagaaggattctcggacatctatctgctgtttactgtgtagcatttgataggacaggacatagaatctttacaggttcagatgactgtttggtaaagatttggtcaacacataatggccgcttgttatctacattaagaggtcattctgcagaaatttcagatatggcagtaaactatgagaatacaatgattgctgcggggagctgtgataaaattattagagtgtggtgcttgagaacttgtgccccagttgctgtgctccaaggacacacaggatcaattacatctttacagtttagcccgatggccaaaggctctcaaagatacatggtttccactggtgctgatgggacagtttgcttttggcaatgggatttagaatccttaaaatttagcccacgtcccctgaagttcactgaaaagcctaggccaggcgttcaaatgctttgttcttcttttagtgttggtggtatgtttttagccacaggtagtactgatcatgtaatcagaatgtattttttgggttttgaagcacccgaaaaaatcgcagaacttgaaagccacactgataaagtagatagtatccaattttgtaacaatggtgatcggttcctaagtggtagcagagatggaacagcacggatttggagatttgagcagttagaatggaggagcattttattggatatggctaccagaatctcaggggacttatcttccgaagaggaaaggtttatgaaacctaaagtaacaatgatagcttggaatcaaaatgatagcattgttgtcacagctgtgaatgatcatgtcctcaaagtgtggaattcttacactggacaactgcttcataacttaatggtaggtaatttctggtacaatgtaacaaatgagattttttgaaatatgattgtaattttgaagctataaaaataatatattgaacaagttgtttctctcatgtaaactatgaaatgattagaaatttttataattataaattattgtcgaatacatttctaaaagtatatgctgtaacagtatgtatttttaaattttcaatttgtaacttgtaaaccctccttaatgttatgactttgttaaataaagggacatgctgatgaagtatttgttctggagacacatccctttgattccagaattatgttatctgcaggacatgatggcagcatatttatatgggatattacaaaaggtaccaagatgaaacattattttaatatgattgaaggacaaggacatggagctgtgtttgactgtaagttttcacaggatggacagcattttgcctgtacagattctcatgggcaccttctgatatttggttttggatgcagcaaaccatatgaaaagattcctgatcagatgttcttccatactgactatcgaccacttattagagattctaataattatgtcttagatgagcaaactcagcaggctcctcatcttatgcctccaccattcttggtagatgtagatggaaatcctcatccaaccaagtatcagagattagtaccaggccgagaaaattctgcagatgaacatttgattccacagctgggctatgtggcaacaagtgatggagaggtgattgaacaaattataagcctgcaaaccaatgataatgatgaacgcagcccagaatcgagtattcttgatggaatgataagacagttgcagcagcagcaagatcagagaatgggagcagatcaggatactattccaagaggactttcaaatggtgaagaaacaccccggagaggttttagaaggctgagcttagacattcagtcccctccaaatattggtctgcgtcgtagtggacaagttgaaggtgttcgtcagatgcatcaaaacgctccacgcagtcagattgctacagaacgtgacctgcaggcttggaaacgaagagtggttgtaccagaggtaccactaggcatatttaggaagctggaagacttccgattagagaaaggtgaagaggaaagaaatctttatataataggaagaaaaagaaagactcttcagctctcacataagtcggattcagtggttttggtatcacagtctagacaaaggacatgtaggcgtaaatatccaaattatggtagaagaaatcgtagctggcgtgagttatcttctggaaatgagtcttcaagctctgtaagacatgagacttcctgtgatcagagtgaaggttctggttcttcagaagaggatgaatggagaagtgacagaaaaagtgagagttacagcgaaagttcaagtgactcttcatctagatattccgattggacagctgatgcgggcatcaatttgcagcctcctttaagaacatcatgtcgtcgacgaattactcgattttgtagtagttcagaagatgaaatatctactgagaatttatctcctccaaaaagaagacgaaagagaaagaaagaaaataagcctaagaaggagaatttgcggaggatgactccagcagagcttgcaaatatggagcatttatatgaatttcaccctccagtttggattactgacaccacacttagaaaatctccttttgttcctcaaatgggtgatgaggtaatatattttcgacagggtcatgaagcttatattgaggctgtaagaagaaataatatttatgaactgaaccctaataaggagccatggagaaaaatggatcttaggtatcagagaagcagacactggggggaaggttgactatggcaaatccatttgatggatactccatccaggatcaagaattggttaaaatagttggaatacgatatgaagttgggccccctacactctgttgcctaaaactagcatttatagatccagcaactggaaaacttatggacaaatctttctctattagatatcatgatatgccagatgttattgactttcttgtattgcgtcaattttatgatgaagcaagacagaggaattggcagtcttgtgacagattccgctctattattgatgatgcttggtggtttggaacagtgttaagtcaagagccatatcaaccacagtatcctgatagtcatttccagtgttatattgttaggtgggataatactgaaattgaaaaacttagcccatgggacatggaaccaattcctgataatgttgatccacctgaagaattaggagctagtatttctgtcacaacagatgagctagagaaattgctctataaaccacaagctggtgaatggggtcagaaatcaagagatgaagaatgtgatagaattatcagtggtatagatcaacttttgaatcttgatatagcagcagcttttgcaggccctgttgatttgtgtacatacccgaagtactgtactgtagtagcttatccaaccgatctttacacaattcgaatgagacttgttaatcgattttacaggaggctgtctgcgttagtttgggaagtcagatatatagaacataatgccagaacatttaacgaacctgagagtgtaattgcaagatcagctaaaaagataactgaccaacttttaaaatttatcaagaatcaacactgtacaaatatctcagaactttctaacacatctgaaaatgatgagcaaaatgctgaggatttggatgatagtgatcttcctaaaacatcttctggaagaaggagagtccatgatgggaaaaaaagcatcagagctacgaactatgttgaaagcaactggaagaaacagtgtaaggaactagtgaacttaatttttcagtgtgaagattctgaaccatttagacaacctgttgatttggttgaatatccagactacagagatattatagataccccaatggattttggaacagtaagggaaactctagatgcgggaaattatgacagccctttggagttttgcaaagacatccggctgatatttagcaatgcaaaagcgtatacaccaaacaaaagatcaaagatttatagtatgaccttgagattatctgccttatttgaagaaaaaatgaagaaaatctcttctgattttaaaattggtcaaaaattcaatgaaaaacttcgaagaagccagaggttcaagcaacggcaaaattgtaaaggtgacagtcagcctaacaaaagtatcagaaacctcaagccgaagaggttaaaatctcagacaaaaataattcctgagttggtaggttctcctacccagtctacctcaagtaggacagcttatcttggaacccacaagacaagtgctgaaagtgaagtggaagattctttagctacctctttgtcatcgtcagcttccagtagttctgaggaaagcaaagagagttccagagctcgtgaatcctcctcacgcagtgggctatccagaagcagcaatctcagggtaaccagaactagagctgctcaaagaaaaactggtcccgtttcattagcaaatggatgtggcagaaaagccactcgaaagagagtctatttaagtgattctgataacaattcattggagactggtgaaattctaaaagccagagctggaaataaccgaaaagtcttaaggaagtgtgctgctgtggctgccaataaaataaagctaatgagtgatgtagaagagaattctagctctgaaagtgtctgttctggtcggaagctgcctcaccgcaatgcttctgctgtagctagaaaaaagttattacataattctgaagatgaacagagcttaaagtcagaaattgaagaagaggagctaaaagatgaaaatcaacyattaccagtgtccagttctcacactgcccagagcaatgttgatgaatctgaaaacagagactcagagtcagaaagtgatttgcgggtagcccggaaaaattggcatgctaatggttacaagtcccatactccagcaccttcaaagacaaaatttcttaaaatagagtcttctgaggaagactctaaaagtcatgattcagatcatgcatgtaacagaactgctggcccatcaacgtctgtgcagaaacttaaggcagagagcatctcagaggaagcagattctgaaccaggaagatctggtggtaggaaatacaatacatttcacaagaatgcgagtttctttaaaaaaaccaagattctgagtgactcagaagactctgaatctgaagagcaagatagagaagatgggaaatgtcataaaatggaaatgaacccaatttcaggaaatctgaactgtgaccctattgctatgtcccagtgttcctcagatcatggatgtgaaactgatttagattcagatgatgacaaaatagaaaaaccaaacaattttatgaaagattctgcatcacaagacaatggactaagcagaaaaatttccaggaaaagggtctgttccagtgactcagacagtagtttacaggtggttaagaaatcatcaaaagccagaacaggtctcctgaggattactcgaagatgtgcagctacggctgccaataagatcaagctcatgagtgatgtagaagatgtcagtttagaaaatgtgcacactagaagcaaaaatggaaggaaaaaacctctccatcttgcttgtactacagctaagaagaaattgagtgattgtgaaggaagtgtacattgtgaagtaccaagtgaacagtatgcctgtgaaggcaagccacctgatcctgactccgaaggtagtacaaaagtgcttagtcaggctctaaatggagactcagactctgaagatatgttgaattcagaacacaagcacaggcataccaatattcacaaaatagatgcaccttctaaaagaaaaagttcctctgttacatcttcaggagaagattcaaaaagtcatattccagggagtgagactgataggacattttcttcagagtcaaccttggcacaaaaagctactgcagagaataattttgaagtggaactgaattatgggctgcgcaggtggaatggcagaagactcaggacctatggaaaggctccttttagtaagacaaaagtgattcatgattcacaggaaacagcagagaaggaagtaaaaaggaagagatcgcatcctgaattggaaaatgtgaaaatctctgaaacaactgggaattcaaagtttagacctgatactagttccaaatcatcagatttgggatctgtaactgaatcagatattgactgtactgataatacaaaaaccaaaaggaggaaaacgaaaggaaaagcaaaagtagttagaaaaggtaaaacttttacagctaacatatctaaaactgtgagacgtcaaagacaaagcaaacgccctaggttaagtgtggatgataatgactgggaggatttggactatgcaaaatctaaaagagttcttcgacgttcaaaaataaaaacgagaaatcagggtagaaggactgtgagataccatgatggggatgatgacagaagtttagaaaatgtgttagatttcaatggttgcaccttatgaccttgagggaaagccagttcatttaagaggaaatggactggcatttatggtgaaagctggctgttaaaattatttttttgtcttacaattcagggaatatatttatatttttctatgaaaagttatgaatgtgactaaatcatgactgttatttttatttgcacttgctggtctttgtagcagcattcagcacaggtgccaaaatatgcttcattttgggggcagatctattttgacagtatttgactacatatagcaagagtttgaaatatgttaaacactagacatcctggttatcaaaaccaatgagcattactttcatggcagcaagtgtcatgcagttattttctgaatttgtcaaagaggcagtagtttctaacccctgttctatagtagttacaacaatttcacaacctatgtttacagattcttcataaatacatgcatactgacactataatcatgggaggtgtaaccatgattagtaggcgaggtacctaccactttttttttttcttcccctggctacttgagtagaatgcattataccagatctggtcactttcattgaaatggtttctaattttcttcccaagtgctgttgggtttttttcttcttaaggaaaacgttgtcacttttatgttataaacttgaatttataaagtgctggtaaattatttttaatgatttgagtgcatgttttaaacctctaggaccagagcatagtcagagcattttcttttaaattgtgcactaacaaaatgctatataatctgtcttctgtccaagatctcctggtttccattgtaagggatttaaccaaaatcttgctcttccataatcttactctgtgaaatagaggaattcgtgtgccttagatttagaagtgtgttctttaatagagtgtacagggctaaaagagtatttaagttaatatgtaggtttcccccatctgtattccaattgtagaggtgagttttgttaagagtacaattgcaaatcttatctatataggaaaatagctaaatgtcattctccatctctttgttttagtttactgcttccatgtgcaatcctaagcattctttgctggggcaactaaatgtatctttattagtgacttctagtccaaatataagaaactgtcatgttttgtgggaaaataattttataatccatttaaagtgaaagtttatcacacaaatagtacacttattttctaaccaaatacttgataggttatgctactccagtgtagatggccattcctaacttgtttgtgcctgaagatggacttgattcaaatggtttacatatttagtgggtaagggatatgttacagtaccccacctgtaagttatttattagccctaattgtgtttgatttcagacaaaattaacccttttctcctgtgtatctttgaagtggcagataaggtgaagcatcagactggtatcaatattagacaatgttatttattagccctaattgtgtttggtttcagacaaaaccttttctcctgtgtatctttgaagtggcagacaaggcgaacatcagactggtattaatgttagagaatgttctgaagtgttcctattttgtagttatctattccatttgacatagtagaaggtacattttctttctactctgatgcatggggaaggatgtttttggacattatcaactgagataggtgggaaacctcctctcatttgtggcttagagagctatcaccatttcagaactatgatgcttttcttctcagaacttgtgttaagtagatagtaaacagattgattcatgataattgtccttgactaagactgaaaagactaatgggatgccttttactttgctaattttaaaaactggtgatagatgtcaaatccattaatttatttaaactcttcttaaccttctcttttataatctgttctcaggttttaactccatgtttaccatcatttgcaaaaaggtaccaaaaaaatccataaataaatatggaatacattcataagtacatacattcttttggtataaaacaatattttgacagtttaggcttcattaatagaactattctgattatttggactgcattaattggtcattgactggccatccaattaccattttttctttcagtccaaaatagttagacccttgcatacagaagtggtattttggtttttaatcagatttggtttcatcagaagcagcaagaatggacctgatgtctttaaaagcatagccgacaatggtagcttctcaagttatgaaataaaactgagagataatggagaaaataatttttatgggtttttttggttatggtgctattcctaaggttaactttgaatatgtgacacacacactcctaagtacctttaaggaaaattaataaatcattaatagttaaaatgtttacattgagcactagaacatgtttggccttttttttctacgttatgcaaaatgcccagggatttaatgcacaggtgtactttaatgtttagggtcagtttgtagtattcttgagaaaaagataaagggttataatttgaatgtgaactgatccagaaataagtgctgtacctttccactgcacttgaagttcaacttaatggtgtatgtgaaaaacaaaaactactttggttgtgtatgtccaaagtcctatggttttattcatttatggttttacaggctttgaagtactcagatttgatttttgctttcttggaaagactcactttaccaagcatataaaggaaaaatgatttcaaacattgacaagatagatgagtgttaacaaagctttcttttttcgtgtcctccttatttaaaaaggtatacttacaatgtgaagtaacttatgaataaaaggaaaagtttatcccatattcaaataattcctaaggtcagcctccctttttgtaagtggcaaatatctgattaaatcatttctcagtttattaatccttggaaacaatgatatagcagttactcacagcttgtaaattacaacagaaaggttcctttcaaatagtagagctgcacctaaagaggaaattgggtttataagaaaatggaggcaaagaacttaagttttaagaaaaagcacttcaaaacagaagggcaaatggaaaaggggaatataaaacaaaccaataaaaataccatctgagggtgttactgtccaaaagtaaagaataagatgcatcactaagccctttgcactcgttatgacctcgtaagtaaaaattatcacttagaataaggggtgcacactacattccctctgtcttctagacttttttttttgtagaagaatcagaaaacaatttactaacctccctgtttgatattaaaaataggaagaattttaatattttctgttagtacaagttgaacttgattgtgccaactgaaaccccagaggtttgtatatcagtagaatgcaagaacattgttaaaggtgcttacgatcttttttgttttcctttccactccattgtatcaattttttgagtaacttttaaatggctagaaaatggtctttttgctttgcccttttaaagctgaaataaccagctccattcttttcatgaatagtaagttgatatatttatttatcaggtatcttgcagttgtcaccaaatactgtagttttcttatgttgtatggaaattatagttcaattattttaatgtgatggagtgcaacaagtcattgtagaacttttcacctgttaatgttgaagttatacctctgaatttctgctgtggatatcaaggaaataataaagcagaaaccccaagaaatttgcaacttaacagtttgagactgtctcttatcctagtatttgggaagagaaggaataaatttgtcaaaactaggtgagaaaatagagcattgtgggaaaaactgagtccaactagattagcaaatgttaattcctagctcaaactgtgaatagtaaggattgtaaagtatgtaatgctaagggctgtgttgtcttttcttacgattttaagttttaaaggctgttaaattacagagatgttgcccaaggatacatggggattctcaaaagtaagagatttttacctttttcataatctgccaagctggttcctaatatattgttaaattggtagaaaaatatctttaaattggtgtctgctcaagaattgcttttctagatttgatggagggagggggagagtcacatcatttggattctaccaatctgcaggctctatctttggcaacatgtaaataattagactatacatctgtttctcaagtatggcaagaccaatagtttgaatttaattatcaatgctatggtatactttctggtcatattttagttatgtcagttttaaggtaagttttttcatttattaaagcccttaaatgagattttagactgccaaagagaagaggcagtccaattgacctaactgaaatgagatgaccagtatatagagcctagatggactgtagcagctctacccctttgttttacaaggtaaatcattttaaaaattaccttttttgatcagtgggtaaaagttaaagggatctttaatttttgatatattcaagttaattttctaaatgtgaatcagtccttggactgcaactatatattcacctacaaaatcccaatcaaaaaattacatgagcctgtcaagcagatctttagttttccacttcacataagatcgttaatgttctaaattaatctattcatttagatgatttttgtcagttcttaaatgggatataataaatttagcattttcatcttaacaagcaaaagagttaaaaaacaaaacaaaacactactccaagccaaatacattctagctggttaattccagacttgtcccaagtggttccccaacctcttttccactggtaatttcttttcatgcaggcagaatataggggtgcgagcgctgtgagttttacatatgagcttggataggggaactgaagcgagtcaggagccctgctggaaaaggggtttgccattggattgtctgtggcctggtttctttccagtagtacagtaatagggtagattgaaaacaagtatttacttctgattctgcctgcatttagtgtgaaatgctcttaaggtattgcttctaaaaagcaaattaagcagttaagtataaagtccctgaattcatatttcaaaataaggcttttatgagatttttattaaaaattgcaatagccatcacaaatctgagtttttctaggggtgagagaaaactgtattgtgatgagctagattagttgtagttccagaataagaacaaaaattcagagttgtgtggtgcccatcattgagtaaatgaaccctaaaaatgaataagctaatgaactagttcatggaattatttctgatggtcttttgacctgatgctgccatactgcagtgttaccagctccccctagaaaacggaactgtttaaaaacacagcaagttacagaaaccattttattctacagccattggggtacttcagtttatgggatgtttttggaaacttctgctttgggagggatgaagatcattgataaatgttatttgctttctgagttttggggtcatttcattgcttatcaatgaagggcagacagaggagagaatatctcaagtcttttctgataaaaggcttgcttgagggagcttataacttgcacctagagggtttacccactttgtggatttgatttatccaccaaccacagcaaccaataatgtcaagattctaggagtttatgaaagaggctagtatgttttcattttgagtcagacattcttttctcattctcaaatctgttttaaatgctccaattttaaaaatgccaatgaaaattttataatgcttctgtagtaaccatatgcagtttactttgaatttaggaaaacagttttgtatgatgaaatattgtgcagaatctgtaaataaggtagcttaaaaaaaaaaaaaaagtctaattagaatatgattaatccttaaaatgtagaaactagagattgtgttgagtcagaactgttatgtttgtatccaggtttctattcaccacatataccatcttagaatacacacatatctgtgagttataatttaaagtggtcatccagggaaatgatcatggagtgctactacagatgtacagttttacactactgatgtgttcttgccatacccaagtagggaatcacttccaggaaaacaagtcctcaagcactcaatgactttgtaaacccatgactgaaacaagactcatctgaggcagtaggactggtgggattctactgacttcttagtatcacatggcaccatcacaaatgcattgttagagcagcaacatccagagttcttaagcttgtaccctaacacacaaatttgacttctaaccctgaaatatcctatatatatttctaaaactgtttgtagttttcttgagaaaaagcactttataatttactcagttttcagtaataaaattaacactgacttgaatgtatttaaaaaaattctccacagttttgtcttcctcagattgtttttatccttattctctgaaattcctgttttattgtctaagacttaagagattcagctttatcaagttagagtacagtgtaattcaaattctccctcccttgggcatagttactgaagttcaaatttccttaagtattttttaaaaacctgattttagttttttttttcctgcagaatcttaacttttccattattctggatgacaaataaacatttattaaaatgtgttagaattagtatttactaggttcctaaattgtcagtataggtactttgatcacacatcaaaatggaatttctgcaacttaaagcattttgttacaaattgtagttgaaatagaattttatctatttgtctggatgaataggttgttgggaatgaaccagttatctgttcttttcttccaaatgcaaatggtgcagctagttgataatagtatattctcatcctactataaagtgcaaatttcaccttaattttgcatattttaaaatttttgtttaccctttgtagcatatttacattttagcatttgctaacattgatttaatgtgttaaagattcattttggatatagggttgacttgttggagatactagttcataattttaaaattcccaagagaagtgtctttgaagtggtaaacacagtgcactttaagccacttctcttcccacagagtccagctgaaggaggtaagggcatgctgcatgagagtaatgccgtgatgagtgtcttactctggtaaaatgccatttacaatgcctggagactgaacactgaacaaaacatagtgcccttagaatttcactggaaaaacatgtgaatcacataagttagttggcaaaaggaactgatgtgtatgtggtggggttgctttgaataaagtatttcctaacctattctggggagaacgctcaactgatcttagagaagtgtgaaatcagtttcatagacttagggaaaaatctgaagtgcttgcactgtgagggcagaggcctgcctcattagtctagctgtatgaacatgtcagtccacagaagcagtttttacctgtactcatctgcccttcagtcagctttgtgacagaagggcaaacatcttcacagaagaaaaagttcagaaggttggcattggtggtttcattgctacagaataatagtgttacttgatagtatctgactaaaagagctctcattttctagtacttagtagtaaaaagaatgtggtggagtcctccagatgtctagtgtgggtggaggatatcaactggttatttcagtgatctacagccttaccttttgaatgctaaatgtctggaaacttcaggcagggtcctacaaaacaaactgccatcaagattggtgtgtaccatgaaggcagttttagatagtttgactgttcatggctgcaagaaagacctaaaattcaagggcccgtgaacttcagatacgtaaaaggaatatcacttctgttctagaagagtactaattagacttgtttgtgaaatttgaaaatttggctttgagacactggtaacaaacatatctgagccctcctaagtttggtcagcacggagtagtagctctggcatcatgtggctgtgtagagctccagtgtgatttcaagccccctctaaaaactgccttagtctgcatgaagtagttaactctccaaagtgctttttgtctggcaaatcccttcacaattttcacctctcgtctaaaagcttccttaaaggaagccttccttgatcccttaggctaggttaggtttccagtctgtgttctcatagcactctgcactttttggttccttaaagcaactctgtgttattttttagaattttaatctgaatctcgtgtgtcacatacctaggtcagaaaatactggaacaatgaagttaagatttagtaattcaaattatgtaaaatgctcatatatatgtttttagattagcagctttatgatgccgatgctgaaggaacttttcaccccattcttacaagtctgctactgttttaagtgacatccttatagttgtagataagcaaatgtaaggttatatcaatgtgaagaagcccttagtatcacattttaaaatttatcatttagcaatatgacttttaaatttattgtttccgaatgagtgttgttgaggaatgttagcagtagtaaaatcttgtgttacaagatttttgcatttacatgaactttcactcatttttcagaatttgttcctagagacagagaacccaatacaaaagtgagaacatgtatgcataatcagaaggatgcagtgcagatgcctagtgaaactctgaaagcaaaaatggtacctgagaaagttccccgcagatgtgctactgttgctgcaaataaaataaagataatgagtaatctaaaagaaacgatctcaggaccagaaaatgtctggattaggaagagtagcagaaaactgccccatcgaaatgcttctgctgcggctaagaaaaaattactgaatgtttataaagaggatgatacaaccataaattctgaaagtgaaaaagagctagaagatattaatagaaaaatgctttttttaagggggttcagatcctggaaagaaaatgcacaatagtgactatgagaatgtagaagtggcatctgaaaacaattggtacacaagtaaactggcagttacattctgctcccagctctaaaattactcccttattggcatctttggaggaattttctaaaagccataatccagtgggttcctcccagtcagctcttgtacagacatgtgctctggggaattctgaggaggaaataaattgcagagtctgtaggtggagaggtggaaagaaaagacaaatggcctgctataagactactattcctttccagaatgcaaggccttgaagacatgattccttagaggaagaatataatgggaagtgtacaggctaggaagaacttgaagtgaacaaatttcaaaatcttaacctgatgctaattttcagggttctccattacagtgtaaaaattcagaccacgacaactatggtgtcatgaggaaaaaaaatcaggcatttttccaaaggaagtgctaatgggcctatttgacttctgagtgaagcaaaaactacccagatccattccctacaattcacatccccaaaggtcaaaaacaaactaggaggacctgggaatttcagctggagatactgattattgagttctgaagtagagtgttggaaataggcaattagagaaagtccattgatgtcattttgtttataatattgcagttcatactgaatgaccacttgatatgactaattcagggaatatatatttttctatgaaagctatgaatgttactatcacggcttttccttatttttacttgtatgtagcagcatttacagaaatgccaaaaatgtgcctcattaagaggcaggtcttaatcagttagataaaaataaaatgtatagcttaagatcaaaacagtcatatttttagatacagtgaaatcttttatgtttctctacagcaccttaaaaattagaacttgaatactttgagtaaacttactacaatctcatcccaacaaactttaatggtagcatgtttggcctatttcattgtggcctgtactaggattagaaaatttggtcgtggtataacaaagaagtgtatttacaataggatttaatttgttgttaatatgtatttgttgaaattaaaattgccagattaaatgaatatactgtcgcatctttttaacatagtaacgtgttactggaaaaattaagttgttgaaagtaagttgttttcccatttaaaaatatctgaatatatgatttgcatgtgtaaatctgaaaaactaaactacagaaacctagggttttctatttcttttttaagtcaaatgcatttttttttttgttatacagatgaaccaagtgtctaaaatacttgagaaatttgtggttgcatgtctgttttaaaaaaaaggctttttgttttttagcataagccagaatattctaacctactaagtctgtgtcctttgctccttttgtagtatactttcatctaaattactgatcccaatatgttgatacacaggtgagaaggaagaattcctaataaactgctattacttttaggtgcatggggtttgatttttgagctctaatgaaatgcttaaacttctttccagttcaaattttacacttaatttataatatttattgagtatattatgtcctcaacaagtaactataaaatgaaatacttaactcggtgaagactattttatgcaaagtttttttttttttttttttttttttttagcaatttcagtgtaatgaaagaatttaagctttgaatttataatttgctgtggtggggttaatttctgtcagtatttgagattgtattatcagtcttgcataatgaaatccttttttggctaagtatttaattcgaacatatttgcctttttaaaaagtgcttggcctaaacttattgtaactgcatgaaataagcatttgcttaaaacttaacattgtaaaattgttctctctgaaatgtgtgcagaatttaaatcatggccaaatgtattactattaccctatttacagtaatttgctttgcagaaaatatttcttcatcatggaactgtgaaatcaaattgaagatcttactggtaaaaatgacaaattaacaaaaggactaagacaagtggtgcccaaacaacctttttattctgcagttccatcatcataatagaccagttaacccaggagtcctaatgttttaaaacatcattgtggtgatcttgtttattctatctcactaaggatatccagtttcctaagctcttactggctagcaatttcgtcttaattttattgctaaatgttcaaattttgcttccaaactcactttatttttgcagatgtgtacatctgctaaatactaattttatgtaaatgattttgttgattatctttccacatcttaaaatgtttctaacagctttgagattttatctcaacaggctctctctgaccccaaagtagtacttaccttcgtgactactgacaaagtcacaaaatgcaggcgatgtcatgtatttcggtacaactaaatctaggaaacggttttttcattgcattactgcatattttcattttcatttaaattatgtcccctttttctcttgcttgaaacagtgctcctcgaactttgtcttccagcacattttaaagagaaccaattaaagaacaatcacacattctgcttattaaaggctatttaaaaagaaacattttgtattagaaaatggccaactttaaaacactattttttacactcataaaaatgttttttaaatcgccttgacaatcatcagcttttgaaatgtgaattcctattgccagagtaaaggtctcgtttttatacca

SEQ ID NO: 21 - DNA, 19181 bp, Homo sapien
ggtccaggcggcgcgcacggtatggcggcggcggcggcggcggcggcggcgcgcgcctgagaagaggggacgccagcccggtcaggcctcggcgcggcctacacgctccgctcgctcgctcgctcccgcctcccgccccgcgcccggccatggcggagccgtcgtccgcccgacgcccggtgcctctcatcgagtcggagctgtacttccttatcgcccggtacctatcggcgggcccgtgtcggagagcggcccaggtgctggtgcaggagctggagcagtaccagttgttgccgaagagattggactgggagggcaacgagcacaacaggagctacgaggagttggtcttgtccaataagcatgtggctcctgatcatcttttgcaaatctgccagcgcatcggtcctatgttggataaagaaattccacccagtatttcaagagtcacttctttacttggtgcaggaaggcagtctttgctacgtacagcaaaagactgcaggcacacagtttggaagggctctgcctttgctgctcttcatagaggaagacctcctgaaatgccagtgaattatggttccccaccaaatcttgtggagatacatcgaggaaaacaactcacagggtgttccacttttagtacagcatttccaggaactatgtatcagcatataaaaatgcacagaaggattctcggacatctatctgctgtttactgtgtagcatttgataggacaggacatagaatctttacaggttcagatgactgtttggtaaagatttggtcaacacataatggccgcttgttatctacattaagaggtcattctgcagaaatttcagatatggcagtaaactatgagaatacaatgattgctgcggggagctgtgataaaattattagagtgtggtgcttgagaacttgtgccccagttgctgtgctccaaggacacacaggatcaattacatctttacagtttagcccgatggccaaaggctctcaaagatacatggtttccactggtgctgatgggacagtttgcttttggcaatgggatttagaatccttaaaatttagcccacgtcccctgaagttcactgaaaagcctaggccaggcgttcaaatgctttgttcttcttttagtgttggtggtatgtttttagccacaggtagtactgatcatgtaatcagaatgtattttttgggttttgaagcacccgaaaaaatcgcagaacttgaaagccacactgataaagtagatagtatccaattttgtaacaatggtgatcggttcctaagtggtagcagagatggaacagcacggatttggagatttgagcagttagaatggaggagcattttattggatatggctaccagaatctcaggggacttatcttccgaagaggaaaggtttatgaaacctaaagtaacaatgatagcttggaatcaaaatgatagcattgttgtcacagctgtgaatgatcatgtcctcaaagtgtggaattcttacactggacaactgcttcataacttaatggtaggtaatttctggtacaatgtaacaaatgagattttttgaaatatgattgtaattttgaagctataaaaataatatattgaacaagttgtttctctcatgtaaactatgaaatgattagaaatttttataattataaattattgtcgaatacatttctaaaagtatatgctgtaacagtatgtatttttaaattttcaatttgtaacttgtaaaccctccttaatgttatgactttgttaaataaagggacatgctgatgaagtatttgttctggagacacatccctttgattccagaattatgttatctgcaggacatgatggcagcatatttatatgggatattacaaaaggtaccaagatgaaacattattttaatatgattgaaggacaaggacatggagctgtgtttgactgtaagttttcacaggatggacagcattttgcctgtacagattctcatgggcaccttctgatatttggttttggatgcagcaaaccatatgaaaagattcctgatcagatgttcttccatactgactatcgaccacttattagagattctaataattatgtcttagatgagcaaactcagcaggctcctcatcttatgcctccaccattcttggtagatgtagatggaaatcctcatccaaccaagtatcagagattagtaccaggccgagaaaattctgcagatgaacatttgattccacagctgggctatgtggcaacaagtgatggagaggtgattgaacaaattataagcctgcaaaccaatgataatgatgaacgcagcccagaatcgagtattcttgatggaatgataagacagttgcagcagcagcaagatcagagaatgggagcagatcaggatactattccaagaggactttcaaatggtgaagaaacaccccggagaggttttagaaggctgagcttagacattcagtcccctccaaatattggtctgcgtcgtagtggacaagttgaaggtgttcgtcagatgcatcaaaacgctccacgcagtcagattgctacagaacgtgacctgcaggcttggaaacgaagagtggttgtaccagaggtaccactaggcatatttaggaagctggaagacttccgattagagaaaggtgaagaggaaagaaatctttatataataggaagaaaaagaaagactcttcagctctcacataagtcggattcagtggttttggtatcacagtctagacaaaggacatgtaggcgtaaatatccaaattatggtagaagaaatcgtagctggcgtgagttatcttctggaaatgagtcttcaagctctgtaagacattgactcttcatctagatattccgattggacagctgatgcgggcatcaatttgcagcctcctttaagaacatcatgtcgtcgacgaattactcgattttgtagtagttcagaagatgaaatatctactgagaatttatctcctccaaaaagaagacgaaagagaaagaaagaaaataagcctaagaaggagaatttgcggaggatgactccagcagagcttgcaaatatggagcatttatatgaatttcaccctccagtttggattactgacaccacacttagaaaatctccttttgttcctcaaatgggtgatgaggtaatatattttcgacagggtcatgaagcttatattgaggctgtaagaagaaataatatttatgaactgaaccctaataaggagccatggagaaaaatggatcttagggatcaagaattggttaaaatagttggaatacgatatgaagttgggccccctacactctgttgcctaaaactagcatttatagatccagcaactggaaaacttatggacaaatctttctctattagatatcatgatatgccagatgttattgactttcttgtattgcgtcaattttatgatgaagcaagacagaggaattggcagtcttgtgacagattccgctctattattgatgatgcttggtggtttggaacagtgttaagtcaagagccatatcaaccacagtatcctgatagtcatttccagtgttatattgttaggtgggataatactgaaattgaaaaacttagcccatgggacatggaaccaattcctgataatgttgatccacctgaagaattaggagctagtatttctgtcacaacagatgagctagagaaattgctctataaaccacaagctggtgaatggggtcagaaatcaagagatgaagaatgtgatagaattatcagtggtatagatcaacttttgaatcttgatatagcagcagcttttgcaggccctgttgatttgtgtacatacccgaagtactgtactgtagtagcttatccaaccgatctttacacaattcgaatgagacttgttaatcgattttacaggaggctgtctgcgttagtttgggaagtcagatatatagaacataatgccagaacatttaacgaacctgagagtgtaattgcaagatcagctaaaaagataactgaccaacttttaaaatttatcaagaatcaacactgtacaaatatctcagaactttctaacacatctgaaaatgatgagcaaaatgctgaggatttggatgatagtgatcttcctaaaacatcttctggaagaaggagagtccatgatgggaaaaaaagcatcagagctacgaactatgttgaaagcaactggaagaaacagtgtaaggaactagtgaacttaatttttcagtgtgaagattctgaaccatttagacaacctgttgatttggttgaatatccagactacagagatattatagataccccaatggattttggaacagtaagggaaactctagatgcgggaaattatgacagccctttggagttttgcaaagacatccggctgatatttagcaatgcaaaagcgtatacaccaaacaaaagatcaaagatttatagtatgaccttgagattatctgccttatttgaagaaaaaatgaagaaaatctcttctgattttaaaattggtcaaaaattcaatgaaaaacttcgaagaagccagaggttcaagcaacggcaaaattgtaaaggtgacagtcagcctaacaaaagtatcagaaacctcaagccgaagaggttaaaatctcagacaaaaataattcctgagttggtaggttctcctacccagtctacctcaagtaggacagcttatcttggaacccacaagacaagtgctggtatctcttcaggtgttacttctggtgactcttcagattcagcagaatcatcagaaaggaggaaaagaaatagacctataacaaatggttctacattatctgaaagtgaagtggaagattctttagctacctctttgtcatcgtcagcttccagtagttctgaggaaagcaaagagagttccagagctcgtgaatcctcctcacgcagtgggctatccagaagcagcaatctcagggtaaccagaactagagctgctcaaagaaaaactggtcccgtttcattagcaaatggatgtggcagaaaagccactcgaaagagagtctatttaagtgattctgataacaattcattggagactggtgaaattctaaaagccagagctggaaataaccgaaaagtcttaaggaagtgtgctgctgtggctgccaataaaataaagctaatgagtgatgtagaagagaattctagctctgaaagtgtctgttctggtcggaagctgcctcaccgcaatgcttctgctgtagctagaaaaaagttattacataattctgaagatgaacagagcttaaagtcagaaattgaagaagaggagctaaaagatgaaaatcaacyattaccagtgtccagttctcacactgcccagagcaatgttgatgaatctgaaaacagagactcagagtcagaaagtgatttgcgggtagcccggaaaaattggcatgctaatggttacaagtcccatactccagcaccttcaaagacaaaatttcttaaaatagagtcttctgaggaagactctaaaagtcatgattcagatcatgcatgtaacagaactgctggcccatcaacgtctgtgcagaaacttaaggcagagagcatctcagaggaagcagattctgaaccaggaagatctggtggtaggaaatacaatacatttcacaagaatgcgagtttctttaaaaaaaccaagattctgagtgactcagaagactctgaatctgaagagcaagatagagaagatgggaaatgtcataaaatggaaatgaacccaatttcaggaaatctgaactgtgaccctattgctatgtcccagtgttcctcagatcatggatgtgaaactgatttagattcagatgatgacaaaatagaaaaaccaaacaattttatgaaagattctgcatcacaagacaatggactaagcagaaaaatttccaggaaaagggtctgttccagtgactcagacagtagtttacaggtggttaagaaatcatcaaaagccagaacaggtctcctgaggattactcgaagatgtgcagctacggctgccaataagatcaagctcatgagtgatgtagaagatgtcagtttagaaaatgtgcacactagaagcaaaaatggaaggaaaaaacctctccatcttgcttgtactacagctaagaagaaattgagtgattgtgaaggaagtgtacattgtgaagtaccaagtgaacagtatgcctgtgaaggcaagccacctgatcctgactccgaaggtagtacaaaagtgcttagtcaggctctaaatggagactcagactctgaagatatgttgaattcagaacacaagcacaggcataccaatattcacaaaatagatgcaccttctaaaagaaaaagttcctctgttacatcttcaggagaagattcaaaaagtcatattccagggagtgagactgataggacattttcttcagagtcaaccttggcacaaaaagctactgcagagaataattttgaagtggaactgaattatgggctgcgcaggtggaatggcagaagactcaggacctatggaaaggctccttttagtaagacaaaagtgattcatgattcacaggaaacagcagagaaggaagtaaaaaggaagagatcgcatcctgaattggaaaatgtgaaaatctctgaaacaactgggaattcaaagtttagacctgatactagttccaaatcatcagatttgggatctgtaactgaatcagatattgactgtactgataatacaaaaaccaaaaggaggaaaacgaaaggaaaagcaaaagtagttagaaaaggtaaaacttttacagctaacatatctaaaactgtgagacgtcaaagacaaagcaaacgccctaggttaagtgtggatgataatgactgggaggatttggactatgcaaaatctaaaagagttcttcgacgttcaaaaataaaaacgagaaatcagggtagaaggactgtgagataccatgatggggatgatgacagaagtttagaaaatgtgttagatttcaatggttgcaccttatgaccttgagggaaagccagttcatttaagaggaaatggactggcatttatggtgaaagctggctgttaaaattatttttttgtcttacaattcagggaatatatttatatttttctatgaaaagttatgaatgtgactaaatcatgactgttatttttatttgcacttgctggtctttgtagcagcattcagcacaggtgccaaaatatgcttcattttgggggcagatctattttgacagtatttgactacatatagcaagagtttgaaatatgttaaacactagacatcctggttatcaaaaccaatgagcattactttcatggcagcaagtgtcatgcagttattttctgaatttgtcaaagaggcagtagtttctaacccctgttctatagtagttacaacaatttcacaacctatgtttacagattcttcataaatacatgcatactgacactataatcatgggaggtgtaaccatgattagtaggcgaggtacctaccactttttttttttcttcccctggctacttgagtagaatgcattataccagatctggtcactttcattgaaatggtttctaattttcttcccaagtgctgttgggtttttttcttcttaaggaaaacgttgtcacttttatgttataaacttgaatttataaagtgctggtaaattatttttaatgatttgagtgcatgttttaaacctctaggaccagagcatagtcagagcattttcttttaaattgtgcactaacaaaatgctatataatctgtcttctgtccaagatctcctggtttccattgtaagggatttaaccaaaatcttgctcttccataatcttactctgtgaaatagaggaattcgtgtgccttagatttagaagtgtgttctttaatagagtgtacagggctaaaagagtatttaagttaatatgtaggtttcccccatctgtattccaattgtagaggtgagttttgttaagagtacaattgcaaatcttatctatataggaaaatagctaaatgtcattctccatctctttgttttagtttactgcttccatgtgcaatcctaagcattctttgctggggcaactaaatgtatctttattagtgacttctagtccaaatataagaaactgtcatgttttgtgggaaaataattttataatccatttaaagtgaaagtttatcacacaaatagtacacttattttctaaccaaatacttgataggttatgctactccagtgtagatggccattcctaacttgtttgtgcctgaagatggacttgattcaaatggtttacatatttagtgggtaagggatatgttacagtaccccacctgtaagttatttattagccctaattgtgtttgatttcagacaaaattaacccttttctcctgtgtatctttgaagtggcagataaggtgaagcatcagactggtatcaatattagacaatgttatttattagccctaattgtgtttggtttcagacaaaaccttttctcctgtgtatctttgaagtggcagacaaggcgaacatcagactggtattaatgttagagaatgttctgaagtgttcctattttgtagttatctattccatttgacatagtagaaggtacattttctttctactctgatgcatggggaaggatgtttttggacattatcaactgagataggtgggaaacctcctctcatttgtggcttagagagctatcaccatttcagaactatgatgcttttcttctcagaacttgtgttaagtagatagtaaacagattgattcatgataattgtccttgactaagactgaaaagactaatgggatgccttttactttgctaattttaaaaactggtgatagatgtcaaatccattaatttatttaaactcttcttaaccttctcttttataatctgttctcaggttttaactccatgtttaccatcatttgcaaaaaggtaccaaaaaaatccataaataaatatggaatacattcataagtacatacattcttttggtataaaacaatattttgacagtttaggcttcattaatagaactattctgattatttggactgcattaattggtcattgactggccatccaattaccattttttctttcagtccaaaatagttagacccttgcatacagaagtggtattttggtttttaatcagatttggtttcatcagaagcagcaagaatggacctgatgtctttaaaagcatagccgacaatggtagcttctcaagttatgaaataaaactgagagataatggagaaaataatttttatgggtttttttggttatggtgctattcctaaggttaactttgaatatgtgacacacacactcctaagtacctttaaggaaaattaataaatcattaatagttaaaatgtttacattgagcactagaacatgtttggccttttttttctacgttatgcaaaatgcccagggatttaatgcacaggtgtactttaatgtttagggtcagtttgtagtattcttgagaaaaagataaagggttataatttgaatgtgaactgatccagaaataagtgctgtacctttccactgcacttgaagttcaacttaatggtgtatgtgaaaaacaaaaactactttggttgtgtatgtccaaagtcctatggttttattcatttatggttttacaggctttgaagtactcagatttgatttttgctttcttggaaagactcactttaccaagcatataaaggaaaaatgatttcaaacattgacaagatagatgagtgttaacaaagctttcttttttcgtgtcctccttatttaaaaaggtatacttacaatgtgaagtaacttatgaataaaaggaaaagtttatcccatattcaaataattcctaaggtcagcctccctttttgtaagtggcaaatatctgattaaatcatttctcagtttattaatccttggaaacaatgatatagcagttactcacagcttgtaaattacaacagaaaggttcctttcaaatagtagagctgcacctaaagaggaaattgggtttataagaaaatggaggcaaagaacttaagttttaagaaaaagcacttcaaaacagaagggcaaatggaaaaggggaatataaaacaaaccaataaaaataccatctgagggtgttactgtccaaaagtaaagaataagatgcatcactaagccctttgcactcgttatgacctcgtaagtaaaaattatcacttagaataaggggtgcacactacattccctctgtcttctagacttttttttttgtagaagaatcagaaaacaatttactaacctccctgtttgatattaaaaataggaagaattttaatattttctgttagtacaagttgaacttgattgtgccaactgaaaccccagaggtttgtatatcagtagaatgcaagaacattgttaaaggtgcttacgatcttttttgttttcctttccactccattgtatcaattttttgagtaacttttaaatggctagaaaatggtctttttgctttgcccttttaaagctgaaataaccagctccattcttttcatgaatagtaagttgatatatttatttatcaggtatcttgcagttgtcaccaaatactgtagttttcttatgttgtatggaaattatagttcaattattttaatgtgatggagtgcaacaagtcattgtagaacttttcacctgttaatgttgaagttatacctctgaatttctgctgtggatatcaaggaaataataaagcagaaaccccaagaaatttgcaacttaacagtttgagactgtctcttatcctagtatttgggaagagaaggaataaatttgtcaaaactaggtgagaaaatagagcattgtgggaaaaactgagtccaactagattagcaaatgttaattcctagctcaaactgtgaatagtaaggattgtaaagtatgtaatgctaagggctgtgttgtcttttcttacgattttaagttttaaaggctgttaaattacagagatgttgcccaaggatacatggggattctcaaaagtaagagatttttacctttttcataatctgccaagctggttcctaatatattgttaaattggtagaaaaatatctttaaattggtgtctgctcaagaattgcttttctagatttgatggagggagggggagagtcacatcatttggattctaccaatctgcaggctctatctttggcaacatgtaaataattagactatacatctgtttctcaagtatggcaagaccaatagtttgaatttaattatcaatgctatggtatactttctggtcatattttagttatgtcagttttaaggtaagttttttcatttattaaagcccttaaatgagattttagactgccaaagagaagaggcagtccaattgacctaactgaaatgagatgaccagtatatagagcctagatggactgtagcagctctacccctttgttttacaaggtaaatcattttaaaaattaccttttttgatcagtgggtaaaagttaaagggatctttaatttttgatatattcaagttaattttctaaatgtgaatcagtccttggactgcaactatatattcacctacaaaatcccaatcaaaaaattacatgagcctgtcaagcagatctttagttttccacttcacataagatcgttaatgttctaaattaatctattcatttagatgatttttgtcagttcttaaatgggatataataaatttagcattttcatcttaacaagcaaaagagttaaaaaacaaaacaaaacactactccaagccaaatacattctagctggttaattccagacttgtcccaagtggttccccaacctcttttccactggtaatttcttttcatgcaggcagaatataggggtgcgagcgctgtgagttttacatatgagcttggataggggaactgaagcgagtcaggagccctgctggaaaaggggtttgccattggattgtctgtggcctggtttctttccagtagtacagtaatagggtagattgaaaacaagtatttacttctgattctgcctgcatttagtgtgaaatgctcttaaggtattgcttctaaaaagcaaattaagcagttaagtataaagtccctgaattcatatttcaaaataaggcttttatgagatttttattaaaaattgcaatagccatcacaaatctgagtttttctaggggtgagagaaaactgtattgtgatgagctagattagttgtagttccagaataagaacaaaaattcagagttgtgtggtgcccatcattgagtaaatgaaccctaaaaatgaataagctaatgaactagttcatggaattatttctgatggtcttttgacctgatgctgccatactgcagtgttaccagctccccctagaaaacggaactgtttaaaaacacagcaagttacagaaaccattttattctacagccattggggtacttcagtttatgggatgtttttggaaacttctgctttgggagggatgaagatcattgataaatgttatttgctttctgagttttggggtcatttcattgcttatcaatgaagggcagacagaggagagaatatctcaagtcttttctgataaaaggcttgcttgagggagcttataacttgcacctagagggtttacccactttgtggatttgatttatccaccaaccacagcaaccaataatgtcaagattctaggagtttatgaaagaggctagtatgttttcattttgagtcagacattcttttctcattctcaaatctgttttaaatgctccaattttaaaaatgccaatgaaaattttataatgcttctgtagtaaccatatgcagtttactttgaatttaggaaaacagttttgtatgatgaaatattgtgcagaatctgtaaataaggtagcttaaaaaaaaaaaaaaagtctaattagaatatgattaatccttaaaatgtagaaactagagattgtgttgagtcagaactgttatgtttgtatccaggtttctattcaccacatataccatcttagaatacacacatatctgtgagttataatttaaagtggtcatccagggaaatgatcatggagtgctactacagatgtacagttttacactactgatgtgttcttgccatacccaagtagggaatcacttccaggaaaacaagtcctcaagcactcaatgactttgtaaacccatgactgaaacaagactcatctgaggcagtaggactggtgggattctactgacttcttagtatcacatggcaccatcacaaatgcattgttagagcagcaacatccagagttcttaagcttgtaccctaacacacaaatttgacttctaaccctgaaatatcctatatatatttctaaaactgtttgtagttttcttgagaaaaagcactttataatttactcagttttcagtaataaaattaacactgacttgaatgtatttaaaaaaattctccacagttttgtcttcctcagattgtttttatccttattctctgaaattcctgttttattgtctaagacttaagagattcagctttatcaagttagagtacagtgtaattcaaattctccctcccttgggcatagttactgaagttcaaatttccttaagtattttttaaaaacctgattttagttttttttttcctgcagaatcttaacttttccattattctggatgacaaataaacatttattaaaatgtgttagaattagtatttactaggttcctaaattgtcagtataggtactttgatcacacatcaaaatggaatttctgcaacttaaagcattttgttacaaattgtagttgaaatagaattttatctatttgtctggatgaataggttgttgggaatgaaccagttatctgttcttttcttccaaatgcaaatggtgcagctagttgataatagtatattctcatcctactataaagtgcaaatttcaccttaattttgcatattttaaaatttttgtttaccctttgtagcatatttacattttagcatttgctaacattgatttaatgtgttaaagattcattttggatatagggttgacttgttggagatactagttcataattttaaaattcccaagagaagtgtctttgaagtggtaaacacagtgcactttaagccacttctcttcccacagagtccagctgaaggaggtaagggcatgctgcatgagagtaatgccgtgatgagtgtcttactctggtaaaatgccatttacaatgcctggagactgaacactgaacaaaacatagtgcccttagaatttcactggaaaaacatgtgaatcacataagttagttggcaaaaggaactgatgtgtatgtggtggggttgctttgaataaagtatttcctaacctattctggggagaacgctcaactgatcttagagaagtgtgaaatcagtttcatagacttagggaaaaatctgaagtgcttgcactgtgagggcagaggcctgcctcattagtctagctgtatgaacatgtcagtccacagaagcagtttttacctgtactcatctgcccttcagtcagctttgtgacagaagggcaaacatcttcacagaagaaaaagttcagaaggttggcattggtggtttcattgctacagaataatagtgttacttgatagtatctgactaaaagagctctcattttctagtacttagtagtaaaaagaatgtggtggagtcctccagatgtctagtgtgggtggaggatatcaactggttatttcagtgatctacagccttaccttttgaatgctaaatgtctggaaacttcaggcagggtcctacaaaacaaactgccatcaagattggtgtgtaccatgaaggcagttttagatagtttgactgttcatggctgcaagaaagacctaaaattcaagggcccgtgaacttcagatacgtaaaaggaatatcacttctgttctagaagagtactaattagacttgtttgtgaaatttgaaaatttggctttgagacactggtaacaaacatatctgagccctcctaagtttggtcagcacggagtagtagctctggcatcatgtggctgtgtagagctccagtgtgatttcaagccccctctaaaaactgccttagtctgcatgaagtagttaactctccaaagtgctttttgtctggcaaatcccttcacaattttcacctctcgtctaaaagcttccttaaaggaagccttccttgatcccttaggctaggttaggtttccagtctgtgttctcatagcactctgcactttttggttccttaaagcaactctgtgttattttttagaattttaatctgaatctcgtgtgtcacatacctaggtcagaaaatactggaacaatgaagttaagatttagtaattcaaattatgtaaaatgctcatatatatgtttttagattagcagctttatgatgccgatgctgaaggaacttttcaccccattcttacaagtctgctactgttttaagtgacatccttatagttgtagataagcaaatgtaaggttatatcaatgtgaagaagcccttagtatcacattttaaaatttatcatttagcaatatgacttttaaatttattgtttccgaatgagtgttgttgaggaatgttagcagtagtaaaatcttgtgttacaagatttttgcatttacatgaactttcactcatttttcagaatttgttcctagagacagagaacccaatacaaaagtgagaacatgtatgcataatcagaaggatgcagtgcagatgcctagtgaaactctgaaagcaaaaatggtacctgagaaagttccccgcagatgtgctactgttgctgcaaataaaataaagataatgagtaatctaaaagaaacgatctcaggaccagaaaatgtctggattaggaagagtagcagaaaactgccccatcgaaatgcttctgctgcggctaagaaaaaattactgaatgtttataaagaggatgatacaaccataaattctgaaagtgaaaaagagctagaagatattaatagaaaaatgctttttttaagggggttcagatcctggaaagaaaatgcacaatagtgactatgagaatgtagaagtggcatctgaaaacaattggtacacaagtaaactggcagttacattctgctcccagctctaaaattactcccttattggcatctttggaggaattttctaaaagccataatccagtgggttcctcccagtcagctcttgtacagacatgtgctctggggaattctgaggaggaaataaattgcagagtctgtaggtggagaggtggaaagaaaagacaaatggcctgctataagactactattcctttccagaatgcaaggccttgaagacatgattccttagaggaagaatataatgggaagtgtacaggctaggaagaacttgaagtgaacaaatttcaaaatcttaacctgatgctaattttcagggttctccattacagtgtaaaaattcagaccacgacaactatggtgtcatgaggaaaaaaaatcaggcatttttccaaaggaagtgctaatgggcctatttgacttctgagtgaagcaaaaactacccagatccattccctacaattcacatccccaaaggtcaaaaacaaactaggaggacctgggaatttcagctggagatactgattattgagttctgaagtagagtgttggaaataggcaattagagaaagtccattgatgtcattttgtttataatattgcagttcatactgaatgaccacttgatatgactaattcagggaatatatatttttctatgaaagctatgaatgttactatcacggcttttccttatttttacttgtatgtagcagcatttacagaaatgccaaaaatgtgcctcattaagaggcaggtcttaatcagttagataaaaataaaatgtatagcttaagatcaaaacagtcatatttttagatacagtgaaatcttttatgtttctctacagcaccttaaaaattagaacttgaatactttgagtaaacttactacaatctcatcccaacaaactttaatggtagcatgtttggcctatttcattgtggcctgtactaggattagaaaatttggtcgtggtataacaaagaagtgtatttacaataggatttaatttgttgttaatatgtatttgttgaaattaaaattgccagattaaatgaatatactgtcgcatctttttaacatagtaacgtgttactggaaaaattaagttgttgaaagtaagttgttttcccatttaaaaatatctgaatatatgatttgcatgtgtaaatctgaaaaactaaactacagaaacctagggttttctatttcttttttaagtcaaatgcatttttttttttgttatacagatgaaccaagtgtctaaaatacttgagaaatttgtggttgcatgtctgttttaaaaaaaaggctttttgttttttagcataagccagaatattctaacctactaagtctgtgtcctttgctccttttgtagtatactttcatctaaattactgatcccaatatgttgatacacaggtgagaaggaagaattcctaataaactgctattacttttaggtgcatggggtttgatttttgagctctaatgaaatgcttaaacttctttccagttcaaattttacacttaatttataatatttattgagtatattatgtcctcaacaagtaactataaaatgaaatacttaactcggtgaagactattttatgcaaagtttttttttttttttttttttttttttagcaatttcagtgtaatgaaagaatttaagctttgaatttataatttgctgtggtggggttaatttctgtcagtatttgagattgtattatcagtcttgcataatgaaatccttttttggctaagtatttaattcgaacatatttgcctttttaaaaagtgcttggcctaaacttattgtaactgcatgaaataagcatttgcttaaaacttaacattgtaaaattgttctctctgaaatgtgtgcagaatttaaatcatggccaaatgtattactattaccctatttacagtaatttgctttgcagaaaatatttcttcatcatggaactgtgaaatcaaattgaagatcttactggtaaaaatgacaaattaacaaaaggactaagacaagtggtgcccaaacaacctttttattctgcagttccatcatcataatagaccagttaacccaggagtcctaatgttttaaaacatcattgtggtgatcttgtttattctatctcactaaggatatccagtttcctaagctcttactggctagcaatttcgtcttaattttattgctaaatgttcaaattttgcttccaaactcactttatttttgcagatgtgtacatctgctaaatactaattttatgtaaatgattttgttgattatctttccacatcttaaaatgtttctaacagctttgagattttatctcaacaggctctctctgaccccaaagtagtacttaccttcgtgactactgacaaagtcacaaaatgcaggcgatgtcatgtatttcggtacaactaaatctaggaaacggttttttcattgcattactgcatattttcattttcatttaaattatgtcccctttttctcttgcttgaaacagtgctcctcgaactttgtcttccagcacattttaaagagaaccaattaaagaacaatcacacattctgcttattaaaggctatttaaaaagaaacattttgtattagaaaatggccaactttaaaacactattttttacactcataaaaatgttttttaaatcgccttgacaatcatcagcttttgaaatgtgaattcctattgccagagtaaaggtctcgtttttatacca

SEQ ID NO: 22 - DNA, 16854 bp, Homo sapien
atatgaaaagctaccaaaatatgtcacagggaattgaaaactagaacaacaattagatacatctattagaatagctaaagtccaaaatggaaaacatttacattgactttttattaactttactcagaatggcctgttgtatcactttctttgctaatggtggtagtgttaaatcttacggatgttctctttttgtcttatgctttgataagaaagggatgtagtgaagaagtttgctttttaagtttatctgattatatatttactgattactgttcatttttcttagatgatttaatcttactggggaggattgtgtacagcttttttctggacatgtgttgtttaacttcagggatcaagatttttttccccccttcacaaattaggagacttcctgtgatcagagtgaaggttctggttcttcagaagaggatgaatggagaagtgacagaaaaagtgagagttacagcgaaagttcaagtgactcttcatctagatattccgattggacagctgatgcgggcatcaatttgcagcctcctttaagaacatcatgtcgtcgacgaattactcgattttgtagtagttcagaagatgaaatatctactgagaatttatctcctccaaaaagaagacgaaagagaaagaaagaaaataagcctaagaaggagaatttgcggaggatgactccagcagagcttgcaaatatggagcatttatatgaatttcaccctccagtttggattactgacaccacacttagaaaatctccttttgttcctcaaatgggtgatgaggtaatatattttcgacagggtcatgaagcttatattgaggctgtaagaagaaataatatttatgaactgaaccctaataaggagccatggagaaaaatggatcttaggtatcagagaagcagacactggggggaaggttgactatggcaaatccatttgatggatactccatccaggatcaagaattggttaaaatagttggaatacgatatgaagttgggccccctacactctgttgcctaaaactagcatttatagatccagcaactggaaaacttatggacaaatctttctctattagatatcatgatatgccagatgttattgactttcttgtattgcgtcaattttatgatgaagcaagacagaggaattggcagtcttgtgacagattccgctctattattgatgatgcttggtggtttggaacagtgttaagtcaagagccatatcaaccacagtatcctgatagtcatttccagtgttatattgttaggtgggataatactgaaattgaaaaacttagcccatgggacatggaaccaattcctgataatgttgatccacctgaagaattaggagctagtatttctgtcacaacagatgagctagagaaattgctctataaaccacaagctggtgaatggggtcagaaatcaagagatgaagaatgtgatagaattatcagtggtatagatcaacttttgaatcttgatatagcagcagcttttgcaggccctgttgatttgtgtacatacccgaagtactgtactgtagtagcttatccaaccgatctttacacaattcgaatgagacttgttaatcgattttacaggaggctgtctgcgttagtttgggaagtcagatatatagaacataatgccagaacatttaacgaacctgagagtgtaattgcaagatcagctaaaaagataactgaccaacttttaaaatttatcaagaatcaacactgtacaaatatctcagaactttctaacacatctgaaaatgatgagcaaaatgctgaggatttggatgatagtgatcttcctaaaacatcttctggaagaaggagagtccatgatgggaaaaaaagcatcagagctacgaactatgttgaaagcaactggaagaaacagtgtaaggaactagtgaacttaatttttcagtgtgaagattctgaaccatttagacaacctgttgatttggttgaatatccagactacagagatattatagataccccaatggattttggaacagtaagggaaactctagatgcgggaaattatgacagccctttggagttttgcaaagacatccggctgatatttagcaatgcaaaagcgtatacaccaaacaaaagatcaaagatttatagtatgaccttgagattatctgccttatttgaagaaaaaatgaagaaaatctcttctgattttaaaattggtcaaaaattcaatgaaaaacttcgaagaagccagaggttcaagcaacggcaaaattgtaaaggtgacagtcagcctaacaaaagtatcagaaacctcaagccgaagaggttaaaatctcagacaaaaataattcctgagttggtaggttctcctacccagtctacctcaagtaggacagcttatcttggaacccacaagacaagtgctggtatctcttcaggtgttacttctggtgactcttcagattcagcagaatcatcagaaaggaggaaaagaaatagacctataacaaatggttctacattatctgaaagtgaagtggaagattctttagctacctctttgtcatcgtcagcttccagtagttctgaggaaagcaaagagagttccagagctcgtgaatcctcctcacgcagtgggctatccagaagcagcaatctcagggtaaccagaactagagctgctcaaagaaaaactggtcccgtttcattagcaaatggatgtggcagaaaagccactcgaaagagagtctatttaagtgattctgataacaattcattggagactggtgaaattctaaaagccagagctggaaataaccgaaaagtcttaaggaagtgtgctgctgtggctgccaataaaataaagctaatgagtgatgtagaagagaattctagctctgaaagtgtctgttctggtcggaagctgcctcaccgcaatgcttctgctgtagctagaaaaaagttattacataattctgaagatgaacagagcttaaagtcagaaattgaagaagaggagctaaaagatgaaaatcaacyattaccagtgtccagttctcacactgcccagagcaatgttgatgaatctgaaaacagagactcagagtcagaaagtgatttgcgggtagcccggaaaaattggcatgctaatggttacaagtcccatactccagcaccttcaaagacaaaatttcttaaaatagagtcttctgaggaagactctaaaagtcatgattcagatcatgcatgtaacagaactgctggcccatcaacgtctgtgcagaaacttaaggcagagagcatctcagaggaagcagattctgaaccaggaagatctggtggtaggaaatacaatacatttcacaagaatgcgagtttctttaaaaaaaccaagattctgagtgactcagaagactctgaatctgaagagcaagatagagaagatgggaaatgtcataaaatggaaatgaacccaatttcaggaaatctgaactgtgaccctattgctatgtcccagtgttcctcagatcatggatgtgaaactgatttagattcagatgatgacaaaatagaaaaaccaaacaattttatgaaagattctgcatcacaagacaatggactaagcagaaaaatttccaggaaaagggtctgttccagtgactcagacagtagtttacaggtggttaagaaatcatcaaaagccagaacaggtctcctgaggattactcgaagatgtgcagctacggctgccaataagatcaagctcatgagtgatgtagaagatgtcagtttagaaaatgtgcacactagaagcaaaaatggaaggaaaaaacctctccatcttgcttgtactacagctaagaagaaattgagtgattgtgaaggaagtgtacattgtgaagtaccaagtgaacagtatgcctgtgaaggcaagccacctgatcctgactccgaaggtagtacaaaagtgcttagtcaggctctaaatggagactcagactctgaagatatgttgaattcagaacacaagcacaggcataccaatattcacaaaatagatgcaccttctaaaagaaaaagttcctctgttacatcttcaggagaagattcaaaaagtcatattccagggagtgagactgataggacattttcttcagagtcaaccttggcacaaaaagctactgcagagaataattttgaagtggaactgaattatgggctgcgcaggtggaatggcagaagactcaggacctatggaaaggctccttttagtaagacaaaagtgattcatgattcacaggaaacagcagagaaggaagtaaaaaggaagagatcgcatcctgaattggaaaatgtgaaaatctctgaaacaactgggaattcaaagtttagacctgatactagttccaaatcatcagatttgggatctgtaactgaatcagatattgactgtactgataatacaaaaaccaaaaggaggaaaacgaaaggaaaagcaaaagtagttagaaaaggtaaaacttttacagctaacatatctaaaactgtgagacgtcaaagacaaagcaaacgccctaggttaagtgtggatgataatgactgggaggatttggactatgcaaaatctaaaagagttcttcgacgttcaaaaataaaaacgagaaatcagggtagaaggactgtgagataccatgatggggatgatgacagaagtttagaaaatgtgttagatttcaatggttgcaccttatgaccttgagggaaagccagttcatttaagaggaaatggactggcatttatggtgaaagctggctgttaaaattatttttttgtcttacaattcagggaatatatttatatttttctatgaaaagttatgaatgtgactaaatcatgactgttatttttatttgcacttgctggtctttgtagcagcattcagcacaggtgccaaaatatgcttcattttgggggcagatctattttgacagtatttgactacatatagcaagagtttgaaatatgttaaacactagacatcctggttatcaaaaccaatgagcattactttcatggcagcaagtgtcatgcagttattttctgaatttgtcaaagaggcagtagtttctaacccctgttctatagtagttacaacaatttcacaacctatgtttacagattcttcataaatacatgcatactgacactataatcatgggaggtgtaaccatgattagtaggcgaggtacctaccactttttttttttcttcccctggctacttgagtagaatgcattataccagatctggtcactttcattgaaatggtttctaattttcttcccaagtgctgttgggtttttttcttcttaaggaaaacgttgtcacttttatgttataaacttgaatttataaagtgctggtaaattatttttaatgatttgagtgcatgttttaaacctctaggaccagagcatagtcagagcattttcttttaaattgtgcactaacaaaatgctatataatctgtcttctgtccaagatctcctggtttccattgtaagggatttaaccaaaatcttgctcttccataatcttactctgtgaaatagaggaattcgtgtgccttagatttagaagtgtgttctttaatagagtgtacagggctaaaagagtatttaagttaatatgtaggtttcccccatctgtattccaattgtagaggtgagttttgttaagagtacaattgcaaatcttatctatataggaaaatagctaaatgtcattctccatctctttgttttagtttactgcttccatgtgcaatcctaagcattctttgctggggcaactaaatgtatctttattagtgacttctagtccaaatataagaaactgtcatgttttgtgggaaaataattttataatccatttaaagtgaaagtttatcacacaaatagtacacttattttctaaccaaatacttgataggttatgctactccagtgtagatggccattcctaacttgtttgtgcctgaagatggacttgattcaaatggtttacatatttagtgggtaagggatatgttacagtaccccacctgtaagttatttattagccctaattgtgtttgatttcagacaaaattaacccttttctcctgtgtatctttgaagtggcagataaggtgaagcatcagactggtatcaatattagacaatgttatttattagccctaattgtgtttggtttcagacaaaaccttttctcctgtgtatctttgaagtggcagacaaggcgaacatcagactggtattaatgttagagaatgttctgaagtgttcctattttgtagttatctattccatttgacatagtagaaggtacattttctttctactctgatgcatggggaaggatgtttttggacattatcaactgagataggtgggaaacctcctctcatttgtggcttagagagctatcaccatttcagaactatgatgcttttcttctcagaacttgtgttaagtagatagtaaacagattgattcatgataattgtccttgactaagactgaaaagactaatgggatgccttttactttgctaattttaaaaactggtgatagatgtcaaatccattaatttatttaaactcttcttaaccttctcttttataatctgttctcaggttttaactccatgtttaccatcatttgcaaaaaggtaccaaaaaaatccataaataaatatggaatacattcataagtacatacattcttttggtataaaacaatattttgacagtttaggcttcattaatagaactattctgattatttggactgcattaattggtcattgactggccatccaattaccattttttctttcagtccaaaatagttagacccttgcatacagaagtggtattttggtttttaatcagatttggtttcatcagaagcagcaagaatggacctgatgtctttaaaagcatagccgacaatggtagcttctcaagttatgaaataaaactgagagataatggagaaaataatttttatgggtttttttggttatggtgctattcctaaggttaactttgaatatgtgacacacacactcctaagtacctttaaggaaaattaataaatcattaatagttaaaatgtttacattgagcactagaacatgtttggccttttttttctacgttatgcaaaatgcccagggatttaatgcacaggtgtactttaatgtttagggtcagtttgtagtattcttgagaaaaagataaagggttataatttgaatgtgaactgatccagaaataagtgctgtacctttccactgcacttgaagttcaacttaatggtgtatgtgaaaaacaaaaactactttggttgtgtatgtccaaagtcctatggttttattcatttatggttttacaggctttgaagtactcagatttgatttttgctttcttggaaagactcactttaccaagcatataaaggaaaaatgatttcaaacattgacaagatagatgagtgttaacaaagctttcttttttcgtgtcctccttatttaaaaaggtatacttacaatgtgaagtaacttatgaataaaaggaaaagtttatcccatattcaaataattcctaaggtcagcctccctttttgtaagtggcaaatatctgattaaatcatttctcagtttattaatccttggaaacaatgatatagcagttactcacagcttgtaaattacaacagaaaggttcctttcaaatagtagagctgcacctaaagaggaaattgggtttataagaaaatggaggcaaagaacttaagttttaagaaaaagcacttcaaaacagaagggcaaatggaaaaggggaatataaaacaaaccaataaaaataccatctgagggtgttactgtccaaaagtaaagaataagatgcatcactaagccctttgcactcgttatgacctcgtaagtaaaaattatcacttagaataaggggtgcacactacattccctctgtcttctagacttttttttttgtagaagaatcagaaaacaatttactaacctccctgtttgatattaaaaataggaagaattttaatattttctgttagtacaagttgaacttgattgtgccaactgaaaccccagaggtttgtatatcagtagaatgcaagaacattgttaaaggtgcttacgatcttttttgttttcctttccactccattgtatcaattttttgagtaacttttaaatggctagaaaatggtctttttgctttgcccttttaaagctgaaataaccagctccattcttttcatgaatagtaagttgatatatttatttatcaggtatcttgcagttgtcaccaaatactgtagttttcttatgttgtatggaaattatagttcaattattttaatgtgatggagtgcaacaagtcattgtagaacttttcacctgttaatgttgaagttatacctctgaatttctgctgtggatatcaaggaaataataaagcagaaaccccaagaaatttgcaacttaacagtttgagactgtctcttatcctagtatttgggaagagaaggaataaatttgtcaaaactaggtgagaaaatagagcattgtgggaaaaactgagtccaactagattagcaaatgttaattcctagctcaaactgtgaatagtaaggattgtaaagtatgtaatgctaagggctgtgttgtcttttcttacgattttaagttttaaaggctgttaaattacagagatgttgcccaaggatacatggggattctcaaaagtaagagatttttacctttttcataatctgccaagctggttcctaatatattgttaaattggtagaaaaatatctttaaattggtgtctgctcaagaattgcttttctagatttgatggagggagggggagagtcacatcatttggattctaccaatctgcaggctctatctttggcaacatgtaaataattagactatacatctgtttctcaagtatggcaagaccaatagtttgaatttaattatcaatgctatggtatactttctggtcatattttagttatgtcagttttaaggtaagttttttcatttattaaagcccttaaatgagattttagactgccaaagagaagaggcagtccaattgacctaactgaaatgagatgaccagtatatagagcctagatggactgtagcagctctacccctttgttttacaaggtaaatcattttaaaaattaccttttttgatcagtgggtaaaagttaaagggatctttaatttttgatatattcaagttaattttctaaatgtgaatcagtccttggactgcaactatatattcacctacaaaatcccaatcaaaaaattacatgagcctgtcaagcagatctttagttttccacttcacataagatcgttaatgttctaaattaatctattcatttagatgatttttgtcagttcttaaatgggatataataaatttagcattttcatcttaacaagcaaaagagttaaaaaacaaaacaaaacactactccaagccaaatacattctagctggttaattccagacttgtcccaagtggttccccaacctcttttccactggtaatttcttttcatgcaggcagaatataggggtgcgagcgctgtgagttttacatatgagcttggataggggaactgaagcgagtcaggagccctgctggaaaaggggtttgccattggattgtctgtggcctggtttctttccagtagtacagtaatagggtagattgaaaacaagtatttacttctgattctgcctgcatttagtgtgaaatgctcttaaggtattgcttctaaaaagcaaattaagcagttaagtataaagtccctgaattcatatttcaaaataaggcttttatgagatttttattaaaaattgcaatagccatcacaaatctgagtttttctaggggtgagagaaaactgtattgtgatgagctagattagttgtagttccagaataagaacaaaaattcagagttgtgtggtgcccatcattgagtaaatgaaccctaaaaatgaataagctaatgaactagttcatggaattatttctgatggtcttttgacctgatgctgccatactgcagtgttaccagctccccctagaaaacggaactgtttaaaaacacagcaagttacagaaaccattttattctacagccattggggtacttcagtttatgggatgtttttggaaacttctgctttgggagggatgaagatcattgataaatgttatttgctttctgagttttggggtcatttcattgcttatcaatgaagggcagacagaggagagaatatctcaagtcttttctgataaaaggcttgcttgagggagcttataacttgcacctagagggtttacccactttgtggatttgatttatccaccaaccacagcaaccaataatgtcaagattctaggagtttatgaaagaggctagtatgttttcattttgagtcagacattcttttctcattctcaaatctgttttaaatgctccaattttaaaaatgccaatgaaaattttataatgcttctgtagtaaccatatgcagtttactttgaatttaggaaaacagttttgtatgatgaaatattgtgcagaatctgtaaataaggtagcttaaaaaaaaaaaaaaagtctaattagaatatgattaatccttaaaatgtagaaactagagattgtgttgagtcagaactgttatgtttgtatccaggtttctattcaccacatataccatcttagaatacacacatatctgtgagttataatttaaagtggtcatccagggaaatgatcatggagtgctactacagatgtacagttttacactactgatgtgttcttgccatacccaagtagggaatcacttccaggaaaacaagtcctcaagcactcaatgactttgtaaacccatgactgaaacaagactcatctgaggcagtaggactggtgggattctactgacttcttagtatcacatggcaccatcacaaatgcattgttagagcagcaacatccagagttcttaagcttgtaccctaacacacaaatttgacttctaaccctgaaatatcctatatatatttctaaaactgtttgtagttttcttgagaaaaagcactttataatttactcagttttcagtaataaaattaacactgacttgaatgtatttaaaaaaattctccacagttttgtcttcctcagattgtttttatccttattctctgaaattcctgttttattgtctaagacttaagagattcagctttatcaagttagagtacagtgtaattcaaattctccctcccttgggcatagttactgaagttcaaatttccttaagtattttttaaaaacctgattttagttttttttttcctgcagaatcttaacttttccattattctggatgacaaataaacatttattaaaatgtgttagaattagtatttactaggttcctaaattgtcagtataggtactttgatcacacatcaaaatggaatttctgcaacttaaagcattttgttacaaattgtagttgaaatagaattttatctatttgtctggatgaataggttgttgggaatgaaccagttatctgttcttttcttccaaatgcaaatggtgcagctagttgataatagtatattctcatcctactataaagtgcaaatttcaccttaattttgcatattttaaaatttttgtttaccctttgtagcatatttacattttagcatttgctaacattgatttaatgtgttaaagattcattttggatatagggttgacttgttggagatactagttcataattttaaaattcccaagagaagtgtctttgaagtggtaaacacagtgcactttaagccacttctcttcccacagagtccagctgaaggaggtaagggcatgctgcatgagagtaatgccgtgatgagtgtcttactctggtaaaatgccatttacaatgcctggagactgaacactgaacaaaacatagtgcccttagaatttcactggaaaaacatgtgaatcacataagttagttggcaaaaggaactgatgtgtatgtggtggggttgctttgaataaagtatttcctaacctattctggggagaacgctcaactgatcttagagaagtgtgaaatcagtttcatagacttagggaaaaatctgaagtgcttgcactgtgagggcagaggcctgcctcattagtctagctgtatgaacatgtcagtccacagaagcagtttttacctgtactcatctgcccttcagtcagctttgtgacagaagggcaaacatcttcacagaagaaaaagttcagaaggttggcattggtggtttcattgctacagaataatagtgttacttgatagtatctgactaaaagagctctcattttctagtacttagtagtaaaaagaatgtggtggagtcctccagatgtctagtgtgggtggaggatatcaactggttatttcagtgatctacagccttaccttttgaatgctaaatgtctggaaacttcaggcagggtcctacaaaacaaactgccatcaagattggtgtgtaccatgaaggcagttttagatagtttgactgttcatggctgcaagaaagacctaaaattcaagggcccgtgaacttcagatacgtaaaaggaatatcacttctgttctagaagagtactaattagacttgtttgtgaaatttgaaaatttggctttgagacactggtaacaaacatatctgagccctcctaagtttggtcagcacggagtagtagctctggcatcatgtggctgtgtagagctccagtgtgatttcaagccccctctaaaaactgccttagtctgcatgaagtagttaactctccaaagtgctttttgtctggcaaatcccttcacaattttcacctctcgtctaaaagcttccttaaaggaagccttccttgatcccttaggctaggttaggtttccagtctgtgttctcatagcactctgcactttttggttccttaaagcaactctgtgttattttttagaattttaatctgaatctcgtgtgtcacatacctaggtcagaaaatactggaacaatgaagttaagatttagtaattcaaattatgtaaaatgctcatatatatgtttttagattagcagctttatgatgccgatgctgaaggaacttttcaccccattcttacaagtctgctactgttttaagtgacatccttatagttgtagataagcaaatgtaaggttatatcaatgtgaagaagcccttagtatcacattttaaaatttatcatttagcaatatgacttttaaatttattgtttccgaatgagtgttgttgaggaatgttagcagtagtaaaatcttgtgttacaagatttttgcatttacatgaactttcactcatttttcagaatttgttcctagagacagagaacccaatacaaaagtgagaacatgtatgcataatcagaaggatgcagtgcagatgcctagtgaaactctgaaagcaaaaatggtacctgagaaagttccccgcagatgtgctactgttgctgcaaataaaataaagataatgagtaatctaaaagaaacgatctcaggaccagaaaatgtctggattaggaagagtagcagaaaactgccccatcgaaatgcttctgctgcggctaagaaaaaattactgaatgtttataaagaggatgatacaaccataaattctgaaagtgaaaaagagctagaagatattaatagaaaaatgctttttttaagggggttcagatcctggaaagaaaatgcacaatagtgactatgagaatgtagaagtggcatctgaaaacaattggtacacaagtaaactggcagttacattctgctcccagctctaaaattactcccttattggcatctttggaggaattttctaaaagccataatccagtgggttcctcccagtcagctcttgtacagacatgtgctctggggaattctgaggaggaaataaattgcagagtctgtaggtggagaggtggaaagaaaagacaaatggcctgctataagactactattcctttccagaatgcaaggccttgaagacatgattccttagaggaagaatataatgggaagtgtacaggctaggaagaacttgaagtgaacaaatttcaaaatcttaacctgatgctaattttcagggttctccattacagtgtaaaaattcagaccacgacaactatggtgtcatgaggaaaaaaaatcaggcatttttccaaaggaagtgctaatgggcctatttgacttctgagtgaagcaaaaactacccagatccattccctacaattcacatccccaaaggtcaaaaacaaactaggaggacctgggaatttcagctggagatactgattattgagttctgaagtagagtgttggaaataggcaattagagaaagtccattgatgtcattttgtttataatattgcagttcatactgaatgaccacttgatatgactaattcagggaatatatatttttctatgaaagctatgaatgttactatcacggcttttccttatttttacttgtatgtagcagcatttacagaaatgccaaaaatgtgcctcattaagaggcaggtcttaatcagttagataaaaataaaatgtatagcttaagatcaaaacagtcatatttttagatacagtgaaatcttttatgtttctctacagcaccttaaaaattagaacttgaatactttgagtaaacttactacaatctcatcccaacaaactttaatggtagcatgtttggcctatttcattgtggcctgtactaggattagaaaatttggtcgtggtataacaaagaagtgtatttacaataggatttaatttgttgttaatatgtatttgttgaaattaaaattgccagattaaatgaatatactgtcgcatctttttaacatagtaacgtgttactggaaaaattaagttgttgaaagtaagttgttttcccatttaaaaatatctgaatatatgatttgcatgtgtaaatctgaaaaactaaactacagaaacctagggttttctatttcttttttaagtcaaatgcatttttttttttgttatacagatgaaccaagtgtctaaaatacttgagaaatttgtggttgcatgtctgttttaaaaaaaaggctttttgttttttagcataagccagaatattctaacctactaagtctgtgtcctttgctccttttgtagtatactttcatctaaattactgatcccaatatgttgatacacaggtgagaaggaagaattcctaataaactgctattacttttaggtgcatggggtttgatttttgagctctaatgaaatgcttaaacttctttccagttcaaattttacacttaatttataatatttattgagtatattatgtcctcaacaagtaactataaaatgaaatacttaactcggtgaagactattttatgcaaagtttttttttttttttttttttttttttagcaatttcagtgtaatgaaagaatttaagctttgaatttataatttgctgtggtggggttaatttctgtcagtatttgagattgtattatcagtcttgcataatgaaatccttttttggctaagtatttaattcgaacatatttgcctttttaaaaagtgcttggcctaaacttattgtaactgcatgaaataagcatttgcttaaaacttaacattgtaaaattgttctctctgaaatgtgtgcagaatttaaatcatggccaaatgtattactattaccctatttacagtaatttgctttgcagaaaatatttcttcatcatggaactgtgaaatcaaattgaagatcttactggtaaaaatgacaaattaacaaaaggactaagacaagtggtgcccaaacaacctttttattctgcagttccatcatcataatagaccagttaacccaggagtcctaatgttttaaaacatcattgtggtgatcttgtttattctatctcactaaggatatccagtttcctaagctcttactggctagcaatttcgtcttaattttattgctaaatgttcaaattttgcttccaaactcactttatttttgcagatgtgtacatctgctaaatactaattttatgtaaatgattttgttgattatctttccacatcttaaaatgtttctaacagctttgagattttatctcaacaggctctctctgaccccaaagtagtacttaccttcgtgactactgacaaagtcacaaaatgcaggcgatgtcatgtatttcggtacaactaaatctaggaaacggttttttcattgcattactgcatattttcattttcatttaaattatgtcccctttttctcttgcttgaaacagtgctcctcgaactttgtcttccagcacattttaaagagaaccaattaaagaacaatcacacattctgcttattaaaggctatttaaaaagaaacattttgtattagaaaatggccaactttaaaacactattttttacactcataaaaatgttttttaaatcgccttgacaatcatcagcttttgaaatgtgaattcctattgccagagtaaaggtctcgtttttatacca

SEQ ID NO: 23 - DNA, 15613 bp, Homo sapien
ctcccaaagtgctgggattacaggtgtaatcccagcttgctgggccagcttttagggttgatgatatttaacatattttctttattgagattcaacaattttaaaaggtacctatatgcagtatgaaaagggagggtagttttgttggttttctgtatgtgattaagtaatttgttaagatttttgtcctcttcagttcaatataattgcttcggtgtccaatgtattgcctatgactatgatcaagttgagagcattagaaggttattcattataactttgcacttatggtttaattattatttcacagttgtttaattcacatgctgcattttttcacttggtttctatcttctcattttctaagccctaaattgtctactttattttgaaggaggctgtctgcgttagtttgggaagtcagatatatagaacataatgccagaacatttaacgaacctgagagtgtaattgcaagatcagctaaaaagataactgaccaacttttaaaatttatcaagaatcaacactgtacaaatatctcagaactttctaacacatctgaaaatgatgagcaaaatgctgaggatttggatgatagtgatcttcctaaaacatcttctggaagaaggagagtccatgatgggaaaaaaagcatcagagctacgaactatgttgaaagcaactggaagaaacagtgtaaggaactagtgaacttaatttttcagtgtgaagattctgaaccatttagacaacctgttgatttggttgaatatccagactacagagatattatagataccccaatggattttggaacagtaagggaaactctagatgcgggaaattatgacagccctttggagttttgcaaagacatccggctgatatttagcaatgcaaaagcgtatacaccaaacaaaagatcaaagatttatagtatgaccttgagattatctgccttatttgaagaaaaaatgaagaaaatctcttctgattttaaaattggtcaaaaattcaatgaaaaacttcgaagaagccagaggttcaagcaacggcaaaattgtaaaggtgacagtcagcctaacaaaagtatcagaaacctcaagccgaagaggttaaaatctcagacaaaaataattcctgagttggtaggttctcctacccagtctacctcaagtaggacagcttatcttggaacccacaagacaagtgctggtatctcttcaggtgttacttctggtgactcttcagattcagcagaatcatcagaaaggaggaaaagaaatagacctataacaaatggttctacattatctgaaagtgaagtggaagattctttagctacctctttgtcatcgtcagcttccagtagttctgaggaaagcaaagagagttccagagctcgtgaatcctcctcacgcagtgggctatccagaagcagcaatctcagggtaaccagaactagagctgctcaaagaaaaactggtcccgtttcattagcaaatggatgtggcagaaaagccactcgaaagagagtctatttaagtgattctgataacaattcattggagactggtgaaattctaaaagccagagctggaaataaccgaaaagtcttaaggaagtgtgctgctgtggctgccaataaaataaagctaatgagtgatgtagaagagaattctagctctgaaagtgtctgttctggtcggaagctgcctcaccgcaatgcttctgctgtagctagaaaaaagttattacataattctgaagatgaacagagcttaaagtcagaaattgaagaagaggagctaaaagatgaaaatcaacyattaccagtgtccagttctcacactgcccagagcaatgttgatgaatctgaaaacagagactcagagtcagaaagtgatttgcgggtagcccggaaaaattggcatgctaatggttacaagtcccatactccagcaccttcaaagacaaaatttcttaaaatagagtcttctgaggaagactctaaaagtcatgattcagatcatgcatgtaacagaactgctggcccatcaacgtctgtgcagaaacttaaggcagagagcatctcagaggaagcagattctgaaccaggaagatctggtggtaggaaatacaatacatttcacaagaatgcgagtttctttaaaaaaaccaagattctgagtgactcagaagactctgaatctgaagagcaagatagagaagatgggaaatgtcataaaatggaaatgaacccaatttcaggaaatctgaactgtgaccctattgctatgtcccagtgttcctcagatcatggatgtgaaactgatttagattcagatgatgacaaaatagaaaaaccaaacaattttatgaaagattctgcatcacaagacaatggactaagcagaaaaatttccaggaaaagggtctgttccagtgactcagacagtagtttacaggtggttaagaaatcatcaaaagccagaacaggtctcctgaggattactcgaagatgtgcagctacggctgccaataagatcaagctcatgagtgatgtagaagatgtcagtttagaaaatgtgcacactagaagcaaaaatggaaggaaaaaacctctccatcttgcttgtactacagctaagaagaaattgagtgattgtgaaggaagtgtacattgtgaagtaccaagtgaacagtatgcctgtgaaggcaagccacctgatcctgactccgaaggtagtacaaaagtgcttagtcaggctctaaatggagactcagactctgaagatatgttgaattcagaacacaagcacaggcataccaatattcacaaaatagatgcaccttctaaaagaaaaagttcctctgttacatcttcaggagaagattcaaaaagtcatattccagggagtgagactgataggacattttcttcagagtcaaccttggcacaaaaagctactgcagagaataattttgaagtggaactgaattatgggctgcgcaggtggaatggcagaagactcaggacctatggaaaggctccttttagtaagacaaaagtgattcatgattcacaggaaacagcagagaaggaagtaaaaaggaagagatcgcatcctgaattggaaaatgtgaaaatctctgaaacaactgggaattcaaagtttagacctgatactagttccaaatcatcagatttgggatctgtaactgaatcagatattgactgtactgataatacaaaaaccaaaaggaggaaaacgaaaggaaaagcaaaagtagttagaaaaggtaaaacttttacagctaacatatctaaaactgtgagacgtcaaagacaaagcaaacgccctaggttaagtgtggatgataatgactgggaggatttggactatgcaaaatctaaaagagttcttcgacgttcaaaaataaaaacgagaaatcagggtagaaggactgtgagataccatgatggggatgatgacagaagtttagaaaatgtgttagatttcaatggttgcaccttatgaccttgagggaaagccagttcatttaagaggaaatggactggcatttatggtgaaagctggctgttaaaattatttttttgtcttacaattcagggaatatatttatatttttctatgaaaagttatgaatgtgactaaatcatgactgttatttttatttgcacttgctggtctttgtagcagcattcagcacaggtgccaaaatatgcttcattttgggggcagatctattttgacagtatttgactacatatagcaagagtttgaaatatgttaaacactagacatcctggttatcaaaaccaatgagcattactttcatggcagcaagtgtcatgcagttattttctgaatttgtcaaagaggcagtagtttctaacccctgttctatagtagttacaacaatttcacaacctatgtttacagattcttcataaatacatgcatactgacactataatcatgggaggtgtaaccatgattagtaggcgaggtacctaccactttttttttttcttcccctggctacttgagtagaatgcattataccagatctggtcactttcattgaaatggtttctaattttcttcccaagtgctgttgggtttttttcttcttaaggaaaacgttgtcacttttatgttataaacttgaatttataaagtgctggtaaattatttttaatgatttgagtgcatgttttaaacctctaggaccagagcatagtcagagcattttcttttaaattgtgcactaacaaaatgctatataatctgtcttctgtccaagatctcctggtttccattgtaagggatttaaccaaaatcttgctcttccataatcttactctgtgaaatagaggaattcgtgtgccttagatttagaagtgtgttctttaatagagtgtacagggctaaaagagtatttaagttaatatgtaggtttcccccatctgtattccaattgtagaggtgagttttgttaagagtacaattgcaaatcttatctatataggaaaatagctaaatgtcattctccatctctttgttttagtttactgcttccatgtgcaatcctaagcattctttgctggggcaactaaatgtatctttattagtgacttctagtccaaatataagaaactgtcatgttttgtgggaaaataattttataatccatttaaagtgaaagtttatcacacaaatagtacacttattttctaaccaaatacttgataggttatgctactccagtgtagatggccattcctaacttgtttgtgcctgaagatggacttgattcaaatggtttacatatttagtgggtaagggatatgttacagtaccccacctgtaagttatttattagccctaattgtgtttgatttcagacaaaattaacccttttctcctgtgtatctttgaagtggcagataaggtgaagcatcagactggtatcaatattagacaatgttatttattagccctaattgtgtttggtttcagacaaaaccttttctcctgtgtatctttgaagtggcagacaaggcgaacatcagactggtattaatgttagagaatgttctgaagtgttcctattttgtagttatctattccatttgacatagtagaaggtacattttctttctactctgatgcatggggaaggatgtttttggacattatcaactgagataggtgggaaacctcctctcatttgtggcttagagagctatcaccatttcagaactatgatgcttttcttctcagaacttgtgttaagtagatagtaaacagattgattcatgataattgtccttgactaagactgaaaagactaatgggatgccttttactttgctaattttaaaaactggtgatagatgtcaaatccattaatttatttaaactcttcttaaccttctcttttataatctgttctcaggttttaactccatgtttaccatcatttgcaaaaaggtaccaaaaaaatccataaataaatatggaatacattcataagtacatacattcttttggtataaaacaatattttgacagtttaggcttcattaatagaactattctgattatttggactgcattaattggtcattgactggccatccaattaccattttttctttcagtccaaaatagttagacccttgcatacagaagtggtattttggtttttaatcagatttggtttcatcagaagcagcaagaatggacctgatgtctttaaaagcatagccgacaatggtagcttctcaagttatgaaataaaactgagagataatggagaaaataatttttatgggtttttttggttatggtgctattcctaaggttaactttgaatatgtgacacacacactcctaagtacctttaaggaaaattaataaatcattaatagttaaaatgtttacattgagcactagaacatgtttggccttttttttctacgttatgcaaaatgcccagggatttaatgcacaggtgtactttaatgtttagggtcagtttgtagtattcttgagaaaaagataaagggttataatttgaatgtgaactgatccagaaataagtgctgtacctttccactgcacttgaagttcaacttaatggtgtatgtgaaaaacaaaaactactttggttgtgtatgtccaaagtcctatggttttattcatttatggttttacaggctttgaagtactcagatttgatttttgctttcttggaaagactcactttaccaagcatataaaggaaaaatgatttcaaacattgacaagatagatgagtgttaacaaagctttcttttttcgtgtcctccttatttaaaaaggtatacttacaatgtgaagtaacttatgaataaaaggaaaagtttatcccatattcaaataattcctaaggtcagcctccctttttgtaagtggcaaatatctgattaaatcatttctcagtttattaatccttggaaacaatgatatagcagttactcacagcttgtaaattacaacagaaaggttcctttcaaatagtagagctgcacctaaagaggaaattgggtttataagaaaatggaggcaaagaacttaagttttaagaaaaagcacttcaaaacagaagggcaaatggaaaaggggaatataaaacaaaccaataaaaataccatctgagggtgttactgtccaaaagtaaagaataagatgcatcactaagccctttgcactcgttatgacctcgtaagtaaaaattatcacttagaataaggggtgcacactacattccctctgtcttctagacttttttttttgtagaagaatcagaaaacaatttactaacctccctgtttgatattaaaaataggaagaattttaatattttctgttagtacaagttgaacttgattgtgccaactgaaaccccagaggtttgtatatcagtagaatgcaagaacattgttaaaggtgcttacgatcttttttgttttcctttccactccattgtatcaattttttgagtaacttttaaatggctagaaaatggtctttttgctttgcccttttaaagctgaaataaccagctccattcttttcatgaatagtaagttgatatatttatttatcaggtatcttgcagttgtcaccaaatactgtagttttcttatgttgtatggaaattatagttcaattattttaatgtgatggagtgcaacaagtcattgtagaacttttcacctgttaatgttgaagttatacctctgaatttctgctgtggatatcaaggaaataataaagcagaaaccccaagaaatttgcaacttaacagtttgagactgtctcttatcctagtatttgggaagagaaggaataaatttgtcaaaactaggtgagaaaatagagcattgtgggaaaaactgagtccaactagattagcaaatgttaattcctagctcaaactgtgaatagtaaggattgtaaagtatgtaatgctaagggctgtgttgtcttttcttacgattttaagttttaaaggctgttaaattacagagatgttgcccaaggatacatggggattctcaaaagtaagagatttttacctttttcataatctgccaagctggttcctaatatattgttaaattggtagaaaaatatctttaaattggtgtctgctcaagaattgcttttctagatttgatggagggagggggagagtcacatcatttggattctaccaatctgcaggctctatctttggcaacatgtaaataattagactatacatctgtttctcaagtatggcaagaccaatagtttgaatttaattatcaatgctatggtatactttctggtcatattttagttatgtcagttttaaggtaagttttttcatttattaaagcccttaaatgagattttagactgccaaagagaagaggcagtccaattgacctaactgaaatgagatgaccagtatatagagcctagatggactgtagcagctctacccctttgttttacaaggtaaatcattttaaaaattaccttttttgatcagtgggtaaaagttaaagggatctttaatttttgatatattcaagttaattttctaaatgtgaatcagtccttggactgcaactatatattcacctacaaaatcccaatcaaaaaattacatgagcctgtcaagcagatctttagttttccacttcacataagatcgttaatgttctaaattaatctattcatttagatgatttttgtcagttcttaaatgggatataataaatttagcattttcatcttaacaagcaaaagagttaaaaaacaaaacaaaacactactccaagccaaatacattctagctggttaattccagacttgtcccaagtggttccccaacctcttttccactggtaatttcttttcatgcaggcagaatataggggtgcgagcgctgtgagttttacatatgagcttggataggggaactgaagcgagtcaggagccctgctggaaaaggggtttgccattggattgtctgtggcctggtttctttccagtagtacagtaatagggtagattgaaaacaagtatttacttctgattctgcctgcatttagtgtgaaatgctcttaaggtattgcttctaaaaagcaaattaagcagttaagtataaagtccctgaattcatatttcaaaataaggcttttatgagatttttattaaaaattgcaatagccatcacaaatctgagtttttctaggggtgagagaaaactgtattgtgatgagctagattagttgtagttccagaataagaacaaaaattcagagttgtgtggtgcccatcattgagtaaatgaaccctaaaaatgaataagctaatgaactagttcatggaattatttctgatggtcttttgacctgatgctgccatactgcagtgttaccagctccccctagaaaacggaactgtttaaaaacacagcaagttacagaaaccattttattctacagccattggggtacttcagtttatgggatgtttttggaaacttctgctttgggagggatgaagatcattgataaatgttatttgctttctgagttttggggtcatttcattgcttatcaatgaagggcagacagaggagagaatatctcaagtcttttctgataaaaggcttgcttgagggagcttataacttgcacctagagggtttacccactttgtggatttgatttatccaccaaccacagcaaccaataatgtcaagattctaggagtttatgaaagaggctagtatgttttcattttgagtcagacattcttttctcattctcaaatctgttttaaatgctccaattttaaaaatgccaatgaaaattttataatgcttctgtagtaaccatatgcagtttactttgaatttaggaaaacagttttgtatgatgaaatattgtgcagaatctgtaaataaggtagcttaaaaaaaaaaaaaaagtctaattagaatatgattaatccttaaaatgtagaaactagagattgtgttgagtcagaactgttatgtttgtatccaggtttctattcaccacatataccatcttagaatacacacatatctgtgagttataatttaaagtggtcatccagggaaatgatcatggagtgctactacagatgtacagttttacactactgatgtgttcttgccatacccaagtagggaatcacttccaggaaaacaagtcctcaagcactcaatgactttgtaaacccatgactgaaacaagactcatctgaggcagtaggactggtgggattctactgacttcttagtatcacatggcaccatcacaaatgcattgttagagcagcaacatccagagttcttaagcttgtaccctaacacacaaatttgacttctaaccctgaaatatcctatatatatttctaaaactgtttgtagttttcttgagaaaaagcactttataatttactcagttttcagtaataaaattaacactgacttgaatgtatttaaaaaaattctccacagttttgtcttcctcagattgtttttatccttattctctgaaattcctgttttattgtctaagacttaagagattcagctttatcaagttagagtacagtgtaattcaaattctccctcccttgggcatagttactgaagttcaaatttccttaagtattttttaaaaacctgattttagttttttttttcctgcagaatcttaacttttccattattctggatgacaaataaacatttattaaaatgtgttagaattagtatttactaggttcctaaattgtcagtataggtactttgatcacacatcaaaatggaatttctgcaacttaaagcattttgttacaaattgtagttgaaatagaattttatctatttgtctggatgaataggttgttgggaatgaaccagttatctgttcttttcttccaaatgcaaatggtgcagctagttgataatagtatattctcatcctactataaagtgcaaatttcaccttaattttgcatattttaaaatttttgtttaccctttgtagcatatttacattttagcatttgctaacattgatttaatgtgttaaagattcattttggatatagggttgacttgttggagatactagttcataattttaaaattcccaagagaagtgtctttgaagtggtaaacacagtgcactttaagccacttctcttcccacagagtccagctgaaggaggtaagggcatgctgcatgagagtaatgccgtgatgagtgtcttactctggtaaaatgccatttacaatgcctggagactgaacactgaacaaaacatagtgcccttagaatttcactggaaaaacatgtgaatcacataagttagttggcaaaaggaactgatgtgtatgtggtggggttgctttgaataaagtatttcctaacctattctggggagaacgctcaactgatcttagagaagtgtgaaatcagtttcatagacttagggaaaaatctgaagtgcttgcactgtgagggcagaggcctgcctcattagtctagctgtatgaacatgtcagtccacagaagcagtttttacctgtactcatctgcccttcagtcagctttgtgacagaagggcaaacatcttcacagaagaaaaagttcagaaggttggcattggtggtttcattgctacagaataatagtgttacttgatagtatctgactaaaagagctctcattttctagtacttagtagtaaaaagaatgtggtggagtcctccagatgtctagtgtgggtggaggatatcaactggttatttcagtgatctacagccttaccttttgaatgctaaatgtctggaaacttcaggcagggtcctacaaaacaaactgccatcaagattggtgtgtaccatgaaggcagttttagatagtttgactgttcatggctgcaagaaagacctaaaattcaagggcccgtgaacttcagatacgtaaaaggaatatcacttctgttctagaagagtactaattagacttgtttgtgaaatttgaaaatttggctttgagacactggtaacaaacatatctgagccctcctaagtttggtcagcacggagtagtagctctggcatcatgtggctgtgtagagctccagtgtgatttcaagccccctctaaaaactgccttagtctgcatgaagtagttaactctccaaagtgctttttgtctggcaaatcccttcacaattttcacctctcgtctaaaagcttccttaaaggaagccttccttgatcccttaggctaggttaggtttccagtctgtgttctcatagcactctgcactttttggttccttaaagcaactctgtgttattttttagaattttaatctgaatctcgtgtgtcacatacctaggtcagaaaatactggaacaatgaagttaagatttagtaattcaaattatgtaaaatgctcatatatatgtttttagattagcagctttatgatgccgatgctgaaggaacttttcaccccattcttacaagtctgctactgttttaagtgacatccttatagttgtagataagcaaatgtaaggttatatcaatgtgaagaagcccttagtatcacattttaaaatttatcatttagcaatatgacttttaaatttattgtttccgaatgagtgttgttgaggaatgttagcagtagtaaaatcttgtgttacaagatttttgcatttacatgaactttcactcatttttcagaatttgttcctagagacagagaacccaatacaaaagtgagaacatgtatgcataatcagaaggatgcagtgcagatgcctagtgaaactctgaaagcaaaaatggtacctgagaaagttccccgcagatgtgctactgttgctgcaaataaaataaagataatgagtaatctaaaagaaacgatctcaggaccagaaaatgtctggattaggaagagtagcagaaaactgccccatcgaaatgcttctgctgcggctaagaaaaaattactgaatgtttataaagaggatgatacaaccataaattctgaaagtgaaaaagagctagaagatattaatagaaaaatgctttttttaagggggttcagatcctggaaagaaaatgcacaatagtgactatgagaatgtagaagtggcatctgaaaacaattggtacacaagtaaactggcagttacattctgctcccagctctaaaattactcccttattggcatctttggaggaattttctaaaagccataatccagtgggttcctcccagtcagctcttgtacagacatgtgctctggggaattctgaggaggaaataaattgcagagtctgtaggtggagaggtggaaagaaaagacaaatggcctgctataagactactattcctttccagaatgcaaggccttgaagacatgattccttagaggaagaatataatgggaagtgtacaggctaggaagaacttgaagtgaacaaatttcaaaatcttaacctgatgctaattttcagggttctccattacagtgtaaaaattcagaccacgacaactatggtgtcatgaggaaaaaaaatcaggcatttttccaaaggaagtgctaatgggcctatttgacttctgagtgaagcaaaaactacccagatccattccctacaattcacatccccaaaggtcaaaaacaaactaggaggacctgggaatttcagctggagatactgattattgagttctgaagtagagtgttggaaataggcaattagagaaagtccattgatgtcattttgtttataatattgcagttcatactgaatgaccacttgatatgactaattcagggaatatatatttttctatgaaagctatgaatgttactatcacggcttttccttatttttacttgtatgtagcagcatttacagaaatgccaaaaatgtgcctcattaagaggcaggtcttaatcagttagataaaaataaaatgtatagcttaagatcaaaacagtcatatttttagatacagtgaaatcttttatgtttctctacagcaccttaaaaattagaacttgaatactttgagtaaacttactacaatctcatcccaacaaactttaatggtagcatgtttggcctatttcattgtggcctgtactaggattagaaaatttggtcgtggtataacaaagaagtgtatttacaataggatttaatttgttgttaatatgtatttgttgaaattaaaattgccagattaaatgaatatactgtcgcatctttttaacatagtaacgtgttactggaaaaattaagttgttgaaagtaagttgttttcccatttaaaaatatctgaatatatgatttgcatgtgtaaatctgaaaaactaaactacagaaacctagggttttctatttcttttttaagtcaaatgcatttttttttttgttatacagatgaaccaagtgtctaaaatacttgagaaatttgtggttgcatgtctgttttaaaaaaaaggctttttgttttttagcataagccagaatattctaacctactaagtctgtgtcctttgctccttttgtagtatactttcatctaaattactgatcccaatatgttgatacacaggtgagaaggaagaattcctaataaactgctattacttttaggtgcatggggtttgatttttgagctctaatgaaatgcttaaacttctttccagttcaaattttacacttaatttataatatttattgagtatattatgtcctcaacaagtaactataaaatgaaatacttaactcggtgaagactattttatgcaaagtttttttttttttttttttttttttttagcaatttcagtgtaatgaaagaatttaagctttgaatttataatttgctgtggtggggttaatttctgtcagtatttgagattgtattatcagtcttgcataatgaaatccttttttggctaagtatttaattcgaacatatttgcctttttaaaaagtgcttggcctaaacttattgtaactgcatgaaataagcatttgcttaaaacttaacattgtaaaattgttctctctgaaatgtgtgcagaatttaaatcatggccaaatgtattactattaccctatttacagtaatttgctttgcagaaaatatttcttcatcatggaactgtgaaatcaaattgaagatcttactggtaaaaatgacaaattaacaaaaggactaagacaagtggtgcccaaacaacctttttattctgcagttccatcatcataatagaccagttaacccaggagtcctaatgttttaaaacatcattgtggtgatcttgtttattctatctcactaaggatatccagtttcctaagctcttactggctagcaatttcgtcttaattttattgctaaatgttcaaattttgcttccaaactcactttatttttgcagatgtgtacatctgctaaatactaattttatgtaaatgattttgttgattatctttccacatcttaaaatgtttctaacagctttgagattttatctcaacaggctctctctgaccccaaagtagtacttaccttcgtgactactgacaaagtcacaaaatgcaggcgatgtcatgtatttcggtacaactaaatctaggaaacggttttttcattgcattactgcatattttcattttcatttaaattatgtcccctttttctcttgcttgaaacagtgctcctcgaactttgtcttccagcacattttaaagagaaccaattaaagaacaatcacacattctgcttattaaaggctatttaaaaagaaacattttgtattagaaaatggccaactttaaaacactattttttacactcataaaaatgttttttaaatcgccttgacaatcatcagcttttgaaatgtgaattcctattgccagagtaaaggtctcgtttttatacca

SEQ ID NO: 24 - DNA, 16309 bp, Homo sapien
gtagatttacaatgcttttttaagtgatatattcctgtgtaaaggaactaaatatatatgctgtgtgaaaactaatcattagatggacatggcaaaaatagtcattctgaatggtgaaagtttcttttatttttcattcagacagtgcatgctgcccctttctaatctaagaaactttgttctcttccccttggtagaatttgcggaggatgactccagcagagcttgcaaatatggagcatttatatgaatttcaccctccagtttggattactgacaccacacttagaaaatctccttttgttcctcaaatgggtgatgaggtaatatattttcgacagggtcatgaagcttatattgaggctgtaagaagaaataatatttatgaactgaaccctaataaggagccatggagaaaaatggatcttagggatcaagaattggttaaaatagttggaatacgatatgaagttgggccccctacactctgttgcctaaaactagcatttatagatccagcaactggaaaacttatggacaaatctttctctattagatatcatgatatgccagatgttattgactttcttgtattgcgtcaattttatgatgaagcaagacagaggaattggcagtcttgtgacagattccgctctattattgatgatgcttggtggtttggaacagtgttaagtcaagagccatatcaaccacagtatcctgatagtcatttccagtgttatattgttaggtgggataatactgaaattgaaaaacttagcccatgggacatggaaccaattcctgataatgttgatccacctgaagaattaggagctagtatttctgtcacaacagatgagctagagaaattgctctataaaccacaagctggtgaatggggtcagaaatcaagagatgaagaatgtgatagaattatcagtggtatagatcaacttttgaatcttgatatagcagcagcttttgcaggccctgttgatttgtgtacatacccgaagtactgtactgtagtagcttatccaaccgatctttacacaattcgaatgagacttgttaatcgattttacaggaggctgtctgcgttagtttgggaagtcagatatatagaacataatgccagaacatttaacgaacctgagagtgtaattgcaagatcagctaaaaagataactgaccaacttttaaaatttatcaagaatcaacactgtacaaatatctcagaactttctaacacatctgaaaatgatgagcaaaatgctgaggatttggatgatagtgatcttcctaaaacatcttctggaagaaggagagtccatgatgggaaaaaaagcatcagagctacgaactatgttgaaagcaactggaagaaacagtgtaaggaactagtgaacttaatttttcagtgtgaagattctgaaccatttagacaacctgttgatttggttgaatatccagactacagagatattatagataccccaatggattttggaacagtaagggaaactctagatgcgggaaattatgacagccctttggagttttgcaaagacatccggctgatatttagcaatgcaaaagcgtatacaccaaacaaaagatcaaagatttatagtatgaccttgagattatctgccttatttgaagaaaaaatgaagaaaatctcttctgattttaaaattggtcaaaaattcaatgaaaaacttcgaagaagccagaggttcaagcaacggcaaaattgtaaaggtgacagtcagcctaacaaaagtatcagaaacctcaagccgaagaggttaaaatctcagacaaaaataattcctgagttggtaggttctcctacccagtctacctcaagtaggacagcttatcttggaacccacaagacaagtgctggtatctcttcaggtgttacttctggtgactcttcagattcagcagaatcatcagaaaggaggaaaagaaatagacctataacaaatggttctacattatctgaaagtgaagtggaagattctttagctacctctttgtcatcgtcagcttccagtagttctgaggaaagcaaagagagttccagagctcgtgaatcctcctcacgcagtgggctatccagaagcagcaatctcagggtaaccagaactagagctgctcaaagaaaaactggtcccgtttcattagcaaatggatgtggcagaaaagccactcgaaagagagtctatttaagtgattctgataacaattcattggagactggtgaaattctaaaagccagagctggaaataaccgaaaagtcttaaggaagtgtgctgctgtggctgccaataaaataaagctaatgagtgatgtagaagagaattctagctctgaaagtgtctgttctggtcggaagctgcctcaccgcaatgcttctgctgtagctagaaaaaagttattacataattctgaagatgaacagagcttaaagtcagaaattgaagaagaggagctaaaagatgaaaatcaacyattaccagtgtccagttctcacactgcccagagcaatgttgatgaatctgaaaacagagactcagagtcagaaagtgatttgcgggtagcccggaaaaattggcatgctaatggttacaagtcccatactccagcaccttcaaagacaaaatttcttaaaatagagtcttctgaggaagactctaaaagtcatgattcagatcatgcatgtaacagaactgctggcccatcaacgtctgtgcagaaacttaaggcagagagcatctcagaggaagcagattctgaaccaggaagatctggtggtaggaaatacaatacatttcacaagaatgcgagtttctttaaaaaaaccaagattctgagtgactcagaagactctgaatctgaagagcaagatagagaagatgggaaatgtcataaaatggaaatgaacccaatttcaggaaatctgaactgtgaccctattgctatgtcccagtgttcctcagatcatggatgtgaaactgatttagattcagatgatgacaaaatagaaaaaccaaacaattttatgaaagattctgcatcacaagacaatggactaagcagaaaaatttccaggaaaagggtctgttccagtgactcagacagtagtttacaggtggttaagaaatcatcaaaagccagaacaggtctcctgaggattactcgaagatgtgcagctacggctgccaataagatcaagctcatgagtgatgtagaagatgtcagtttagaaaatgtgcacactagaagcaaaaatggaaggaaaaaacctctccatcttgcttgtactacagctaagaagaaattgagtgattgtgaaggaagtgtacattgtgaagtaccaagtgaacagtatgcctgtgaaggcaagccacctgatcctgactccgaaggtagtacaaaagtgcttagtcaggctctaaatggagactcagactctgaagatatgttgaattcagaacacaagcacaggcataccaatattcacaaaatagatgcaccttctaaaagaaaaagttcctctgttacatcttcaggagaagattcaaaaagtcatattccagggagtgagactgataggacattttcttcagagtcaaccttggcacaaaaagctactgcagagaataattttgaagtggaactgaattatgggctgcgcaggtggaatggcagaagactcaggacctatggaaaggctccttttagtaagacaaaagtgattcatgattcacaggaaacagcagagaaggaagtaaaaaggaagagatcgcatcctgaattggaaaatgtgaaaatctctgaaacaactgggaattcaaagtttagacctgatactagttccaaatcatcagatttgggatctgtaactgaatcagatattgactgtactgataatacaaaaaccaaaaggaggaaaacgaaaggaaaagcaaaagtagttagaaaaggtaaaacttttacagctaacatatctaaaactgtgagacgtcaaagacaaagcaaacgccctaggttaagtgtggatgataatgactgggaggatttggactatgcaaaatctaaaagagttcttcgacgttcaaaaataaaaacgagaaatcagggtagaaggactgtgagataccatgatggggatgatgacagaagtttagaaaatgtgttagatttcaatggttgcaccttatgaccttgagggaaagccagttcatttaagaggaaatggactggcatttatggtgaaagctggctgttaaaattatttttttgtcttacaattcagggaatatatttatatttttctatgaaaagttatgaatgtgactaaatcatgactgttatttttatttgcacttgctggtctttgtagcagcattcagcacaggtgccaaaatatgcttcattttgggggcagatctattttgacagtatttgactacatatagcaagagtttgaaatatgttaaacactagacatcctggttatcaaaaccaatgagcattactttcatggcagcaagtgtcatgcagttattttctgaatttgtcaaagaggcagtagtttctaacccctgttctatagtagttacaacaatttcacaacctatgtttacagattcttcataaatacatgcatactgacactataatcatgggaggtgtaaccatgattagtaggcgaggtacctaccactttttttttttcttcccctggctacttgagtagaatgcattataccagatctggtcactttcattgaaatggtttctaattttcttcccaagtgctgttgggtttttttcttcttaaggaaaacgttgtcacttttatgttataaacttgaatttataaagtgctggtaaattatttttaatgatttgagtgcatgttttaaacctctaggaccagagcatagtcagagcattttcttttaaattgtgcactaacaaaatgctatataatctgtcttctgtccaagatctcctggtttccattgtaagggatttaaccaaaatcttgctcttccataatcttactctgtgaaatagaggaattcgtgtgccttagatttagaagtgtgttctttaatagagtgtacagggctaaaagagtatttaagttaatatgtaggtttcccccatctgtattccaattgtagaggtgagttttgttaagagtacaattgcaaatcttatctatataggaaaatagctaaatgtcattctccatctctttgttttagtttactgcttccatgtgcaatcctaagcattctttgctggggcaactaaatgtatctttattagtgacttctagtccaaatataagaaactgtcatgttttgtgggaaaataattttataatccatttaaagtgaaagtttatcacacaaatagtacacttattttctaaccaaatacttgataggttatgctactccagtgtagatggccattcctaacttgtttgtgcctgaagatggacttgattcaaatggtttacatatttagtgggtaagggatatgttacagtaccccacctgtaagttatttattagccctaattgtgtttgatttcagacaaaattaacccttttctcctgtgtatctttgaagtggcagataaggtgaagcatcagactggtatcaatattagacaatgttatttattagccctaattgtgtttggtttcagacaaaaccttttctcctgtgtatctttgaagtggcagacaaggcgaacatcagactggtattaatgttagagaatgttctgaagtgttcctattttgtagttatctattccatttgacatagtagaaggtacattttctttctactctgatgcatggggaaggatgtttttggacattatcaactgagataggtgggaaacctcctctcatttgtggcttagagagctatcaccatttcagaactatgatgcttttcttctcagaacttgtgttaagtagatagtaaacagattgattcatgataattgtccttgactaagactgaaaagactaatgggatgccttttactttgctaattttaaaaactggtgatagatgtcaaatccattaatttatttaaactcttcttaaccttctcttttataatctgttctcaggttttaactccatgtttaccatcatttgcaaaaaggtaccaaaaaaatccataaataaatatggaatacattcataagtacatacattcttttggtataaaacaatattttgacagtttaggcttcattaatagaactattctgattatttggactgcattaattggtcattgactggccatccaattaccattttttctttcagtccaaaatagttagacccttgcatacagaagtggtattttggtttttaatcagatttggtttcatcagaagcagcaagaatggacctgatgtctttaaaagcatagccgacaatggtagcttctcaagttatgaaataaaactgagagataatggagaaaataatttttatgggtttttttggttatggtgctattcctaaggttaactttgaatatgtgacacacacactcctaagtacctttaaggaaaattaataaatcattaatagttaaaatgtttacattgagcactagaacatgtttggccttttttttctacgttatgcaaaatgcccagggatttaatgcacaggtgtactttaatgtttagggtcagtttgtagtattcttgagaaaaagataaagggttataatttgaatgtgaactgatccagaaataagtgctgtacctttccactgcacttgaagttcaacttaatggtgtatgtgaaaaacaaaaactactttggttgtgtatgtccaaagtcctatggttttattcatttatggttttacaggctttgaagtactcagatttgatttttgctttcttggaaagactcactttaccaagcatataaaggaaaaatgatttcaaacattgacaagatagatgagtgttaacaaagctttcttttttcgtgtcctccttatttaaaaaggtatacttacaatgtgaagtaacttatgaataaaaggaaaagtttatcccatattcaaataattcctaaggtcagcctccctttttgtaagtggcaaatatctgattaaatcatttctcagtttattaatccttggaaacaatgatatagcagttactcacagcttgtaaattacaacagaaaggttcctttcaaatagtagagctgcacctaaagaggaaattgggtttataagaaaatggaggcaaagaacttaagttttaagaaaaagcacttcaaaacagaagggcaaatggaaaaggggaatataaaacaaaccaataaaaataccatctgagggtgttactgtccaaaagtaaagaataagatgcatcactaagccctttgcactcgttatgacctcgtaagtaaaaattatcacttagaataaggggtgcacactacattccctctgtcttctagacttttttttttgtagaagaatcagaaaacaatttactaacctccctgtttgatattaaaaataggaagaattttaatattttctgttagtacaagttgaacttgattgtgccaactgaaaccccagaggtttgtatatcagtagaatgcaagaacattgttaaaggtgcttacgatcttttttgttttcctttccactccattgtatcaattttttgagtaacttttaaatggctagaaaatggtctttttgctttgcccttttaaagctgaaataaccagctccattcttttcatgaatagtaagttgatatatttatttatcaggtatcttgcagttgtcaccaaatactgtagttttcttatgttgtatggaaattatagttcaattattttaatgtgatggagtgcaacaagtcattgtagaacttttcacctgttaatgttgaagttatacctctgaatttctgctgtggatatcaaggaaataataaagcagaaaccccaagaaatttgcaacttaacagtttgagactgtctcttatcctagtatttgggaagagaaggaataaatttgtcaaaactaggtgagaaaatagagcattgtgggaaaaactgagtccaactagattagcaaatgttaattcctagctcaaactgtgaatagtaaggattgtaaagtatgtaatgctaagggctgtgttgtcttttcttacgattttaagttttaaaggctgttaaattacagagatgttgcccaaggatacatggggattctcaaaagtaagagatttttacctttttcataatctgccaagctggttcctaatatattgttaaattggtagaaaaatatctttaaattggtgtctgctcaagaattgcttttctagatttgatggagggagggggagagtcacatcatttggattctaccaatctgcaggctctatctttggcaacatgtaaataattagactatacatctgtttctcaagtatggcaagaccaatagtttgaatttaattatcaatgctatggtatactttctggtcatattttagttatgtcagttttaaggtaagttttttcatttattaaagcccttaaatgagattttagactgccaaagagaagaggcagtccaattgacctaactgaaatgagatgaccagtatatagagcctagatggactgtagcagctctacccctttgttttacaaggtaaatcattttaaaaattaccttttttgatcagtgggtaaaagttaaagggatctttaatttttgatatattcaagttaattttctaaatgtgaatcagtccttggactgcaactatatattcacctacaaaatcccaatcaaaaaattacatgagcctgtcaagcagatctttagttttccacttcacataagatcgttaatgttctaaattaatctattcatttagatgatttttgtcagttcttaaatgggatataataaatttagcattttcatcttaacaagcaaaagagttaaaaaacaaaacaaaacactactccaagccaaatacattctagctggttaattccagacttgtcccaagtggttccccaacctcttttccactggtaatttcttttcatgcaggcagaatataggggtgcgagcgctgtgagttttacatatgagcttggataggggaactgaagcgagtcaggagccctgctggaaaaggggtttgccattggattgtctgtggcctggtttctttccagtagtacagtaatagggtagattgaaaacaagtatttacttctgattctgcctgcatttagtgtgaaatgctcttaaggtattgcttctaaaaagcaaattaagcagttaagtataaagtccctgaattcatatttcaaaataaggcttttatgagatttttattaaaaattgcaatagccatcacaaatctgagtttttctaggggtgagagaaaactgtattgtgatgagctagattagttgtagttccagaataagaacaaaaattcagagttgtgtggtgcccatcattgagtaaatgaaccctaaaaatgaataagctaatgaactagttcatggaattatttctgatggtcttttgacctgatgctgccatactgcagtgttaccagctccccctagaaaacggaactgtttaaaaacacagcaagttacagaaaccattttattctacagccattggggtacttcagtttatgggatgtttttggaaacttctgctttgggagggatgaagatcattgataaatgttatttgctttctgagttttggggtcatttcattgcttatcaatgaagggcagacagaggagagaatatctcaagtcttttctgataaaaggcttgcttgagggagcttataacttgcacctagagggtttacccactttgtggatttgatttatccaccaaccacagcaaccaataatgtcaagattctaggagtttatgaaagaggctagtatgttttcattttgagtcagacattcttttctcattctcaaatctgttttaaatgctccaattttaaaaatgccaatgaaaattttataatgcttctgtagtaaccatatgcagtttactttgaatttaggaaaacagttttgtatgatgaaatattgtgcagaatctgtaaataaggtagcttaaaaaaaaaaaaaaagtctaattagaatatgattaatccttaaaatgtagaaactagagattgtgttgagtcagaactgttatgtttgtatccaggtttctattcaccacatataccatcttagaatacacacatatctgtgagttataatttaaagtggtcatccagggaaatgatcatggagtgctactacagatgtacagttttacactactgatgtgttcttgccatacccaagtagggaatcacttccaggaaaacaagtcctcaagcactcaatgactttgtaaacccatgactgaaacaagactcatctgaggcagtaggactggtgggattctactgacttcttagtatcacatggcaccatcacaaatgcattgttagagcagcaacatccagagttcttaagcttgtaccctaacacacaaatttgacttctaaccctgaaatatcctatatatatttctaaaactgtttgtagttttcttgagaaaaagcactttataatttactcagttttcagtaataaaattaacactgacttgaatgtatttaaaaaaattctccacagttttgtcttcctcagattgtttttatccttattctctgaaattcctgttttattgtctaagacttaagagattcagctttatcaagttagagtacagtgtaattcaaattctccctcccttgggcatagttactgaagttcaaatttccttaagtattttttaaaaacctgattttagttttttttttcctgcagaatcttaacttttccattattctggatgacaaataaacatttattaaaatgtgttagaattagtatttactaggttcctaaattgtcagtataggtactttgatcacacatcaaaatggaatttctgcaacttaaagcattttgttacaaattgtagttgaaatagaattttatctatttgtctggatgaataggttgttgggaatgaaccagttatctgttcttttcttccaaatgcaaatggtgcagctagttgataatagtatattctcatcctactataaagtgcaaatttcaccttaattttgcatattttaaaatttttgtttaccctttgtagcatatttacattttagcatttgctaacattgatttaatgtgttaaagattcattttggatatagggttgacttgttggagatactagttcataattttaaaattcccaagagaagtgtctttgaagtggtaaacacagtgcactttaagccacttctcttcccacagagtccagctgaaggaggtaagggcatgctgcatgagagtaatgccgtgatgagtgtcttactctggtaaaatgccatttacaatgcctggagactgaacactgaacaaaacatagtgcccttagaatttcactggaaaaacatgtgaatcacataagttagttggcaaaaggaactgatgtgtatgtggtggggttgctttgaataaagtatttcctaacctattctggggagaacgctcaactgatcttagagaagtgtgaaatcagtttcatagacttagggaaaaatctgaagtgcttgcactgtgagggcagaggcctgcctcattagtctagctgtatgaacatgtcagtccacagaagcagtttttacctgtactcatctgcccttcagtcagctttgtgacagaagggcaaacatcttcacagaagaaaaagttcagaaggttggcattggtggtttcattgctacagaataatagtgttacttgatagtatctgactaaaagagctctcattttctagtacttagtagtaaaaagaatgtggtggagtcctccagatgtctagtgtgggtggaggatatcaactggttatttcagtgatctacagccttaccttttgaatgctaaatgtctggaaacttcaggcagggtcctacaaaacaaactgccatcaagattggtgtgtaccatgaaggcagttttagatagtttgactgttcatggctgcaagaaagacctaaaattcaagggcccgtgaacttcagatacgtaaaaggaatatcacttctgttctagaagagtactaattagacttgtttgtgaaatttgaaaatttggctttgagacactggtaacaaacatatctgagccctcctaagtttggtcagcacggagtagtagctctggcatcatgtggctgtgtagagctccagtgtgatttcaagccccctctaaaaactgccttagtctgcatgaagtagttaactctccaaagtgctttttgtctggcaaatcccttcacaattttcacctctcgtctaaaagcttccttaaaggaagccttccttgatcccttaggctaggttaggtttccagtctgtgttctcatagcactctgcactttttggttccttaaagcaactctgtgttattttttagaattttaatctgaatctcgtgtgtcacatacctaggtcagaaaatactggaacaatgaagttaagatttagtaattcaaattatgtaaaatgctcatatatatgtttttagattagcagctttatgatgccgatgctgaaggaacttttcaccccattcttacaagtctgctactgttttaagtgacatccttatagttgtagataagcaaatgtaaggttatatcaatgtgaagaagcccttagtatcacattttaaaatttatcatttagcaatatgacttttaaatttattgtttccgaatgagtgttgttgaggaatgttagcagtagtaaaatcttgtgttacaagatttttgcatttacatgaactttcactcatttttcagaatttgttcctagagacagagaacccaatacaaaagtgagaacatgtatgcataatcagaaggatgcagtgcagatgcctagtgaaactctgaaagcaaaaatggtacctgagaaagttccccgcagatgtgctactgttgctgcaaataaaataaagataatgagtaatctaaaagaaacgatctcaggaccagaaaatgtctggattaggaagagtagcagaaaactgccccatcgaaatgcttctgctgcggctaagaaaaaattactgaatgtttataaagaggatgatacaaccataaattctgaaagtgaaaaagagctagaagatattaatagaaaaatgctttttttaagggggttcagatcctggaaagaaaatgcacaatagtgactatgagaatgtagaagtggcatctgaaaacaattggtacacaagtaaactggcagttacattctgctcccagctctaaaattactcccttattggcatctttggaggaattttctaaaagccataatccagtgggttcctcccagtcagctcttgtacagacatgtgctctggggaattctgaggaggaaataaattgcagagtctgtaggtggagaggtggaaagaaaagacaaatggcctgctataagactactattcctttccagaatgcaaggccttgaagacatgattccttagaggaagaatataatgggaagtgtacaggctaggaagaacttgaagtgaacaaatttcaaaatcttaacctgatgctaattttcagggttctccattacagtgtaaaaattcagaccacgacaactatggtgtcatgaggaaaaaaaatcaggcatttttccaaaggaagtgctaatgggcctatttgacttctgagtgaagcaaaaactacccagatccattccctacaattcacatccccaaaggtcaaaaacaaactaggaggacctgggaatttcagctggagatactgattattgagttctgaagtagagtgttggaaataggcaattagagaaagtccattgatgtcattttgtttataatattgcagttcatactgaatgaccacttgatatgactaattcagggaatatatatttttctatgaaagctatgaatgttactatcacggcttttccttatttttacttgtatgtagcagcatttacagaaatgccaaaaatgtgcctcattaagaggcaggtcttaatcagttagataaaaataaaatgtatagcttaagatcaaaacagtcatatttttagatacagtgaaatcttttatgtttctctacagcaccttaaaaattagaacttgaatactttgagtaaacttactacaatctcatcccaacaaactttaatggtagcatgtttggcctatttcattgtggcctgtactaggattagaaaatttggtcgtggtataacaaagaagtgtatttacaataggatttaatttgttgttaatatgtatttgttgaaattaaaattgccagattaaatgaatatactgtcgcatctttttaacatagtaacgtgttactggaaaaattaagttgttgaaagtaagttgttttcccatttaaaaatatctgaatatatgatttgcatgtgtaaatctgaaaaactaaactacagaaacctagggttttctatttcttttttaagtcaaatgcatttttttttttgttatacagatgaaccaagtgtctaaaatacttgagaaatttgtggttgcatgtctgttttaaaaaaaaggctttttgttttttagcataagccagaatattctaacctactaagtctgtgtcctttgctccttttgtagtatactttcatctaaattactgatcccaatatgttgatacacaggtgagaaggaagaattcctaataaactgctattacttttaggtgcatggggtttgatttttgagctctaatgaaatgcttaaacttctttccagttcaaattttacacttaatttataatatttattgagtatattatgtcctcaacaagtaactataaaatgaaatacttaactcggtgaagactattttatgcaaagtttttttttttttttttttttttttttagcaatttcagtgtaatgaaagaatttaagctttgaatttataatttgctgtggtggggttaatttctgtcagtatttgagattgtattatcagtcttgcataatgaaatccttttttggctaagtatttaattcgaacatatttgcctttttaaaaagtgcttggcctaaacttattgtaactgcatgaaataagcatttgcttaaaacttaacattgtaaaattgttctctctgaaatgtgtgcagaatttaaatcatggccaaatgtattactattaccctatttacagtaatttgctttgcagaaaatatttcttcatcatggaactgtgaaatcaaattgaagatcttactggtaaaaatgacaaattaacaaaaggactaagacaagtggtgcccaaacaacctttttattctgcagttccatcatcataatagaccagttaacccaggagtcctaatgttttaaaacatcattgtggtgatcttgtttattctatctcactaaggatatccagtttcctaagctcttactggctagcaatttcgtcttaattttattgctaaatgttcaaattttgcttccaaactcactttatttttgcagatgtgtacatctgctaaatactaattttatgtaaatgattttgttgattatctttccacatcttaaaatgtttctaacagctttgagattttatctcaacaggctctctctgaccccaaagtagtacttaccttcgtgactactgacaaagtcacaaaatgcaggcgatgtcatgtatttcggtacaactaaatctaggaaacggttttttcattgcattactgcatattttcattttcatttaaattatgtcccctttttctcttgcttgaaacagtgctcctcgaactttgtcttccagcacattttaaagagaaccaattaaagaacaatcacacattctgcttattaaaggctatttaaaaagaaacattttgtattagaaaatggccaactttaaaacactattttttacactcataaaaatgttttttaaatcgccttgacaatcatcagcttttgaaatgtgaattcctattgccagagtaaaggtctcgtttttatacca

SEQ ID NO: 25 - DNA, 16387 bp, Homo sapien
gttccctcaattttatatgattgacttgctatcagtgcttatattctggctccattcaactgaaagcactccccttttctagtgatgactcttcatctagatattccgattggacagctgatgcgggcatcaatttgcagcctcctttaagaacatcatgtcgtcgacgaattactcgattttgtagtagttcagaagatgaaatatctactgagaatttatctcctccaaaaagaagacgaaagagaaagaaagaaaataagcctaagaaggagaatttgcggaggatgactccagcagagcttgcaaatatggagcatttatatgaatttcaccctccagtttggattactgacaccacacttagaaaatctccttttgttcctcaaatgggtgatgaggtaatatattttcgacagggtcatgaagcttatattgaggctgtaagaagaaataatatttatgaactgaaccctaataaggagccatggagaaaaatggatcttagggatcaagaattggttaaaatagttggaatacgatatgaagttgggccccctacactctgttgcctaaaactagcatttatagatccagcaactggaaaacttatggacaaatctttctctattagatatcatgatatgccagatgttattgactttcttgtattgcgtcaattttatgatgaagcaagacagaggaattggcagtcttgtgacagattccgctctattattgatgatgcttggtggtttggaacagtgttaagtcaagagccatatcaaccacagtatcctgatagtcatttccagtgttatattgttaggtgggataatactgaaattgaaaaacttagcccatgggacatggaaccaattcctgataatgttgatccacctgaagaattaggagctagtatttctgtcacaacagatgagctagagaaattgctctataaaccacaagctggtgaatggggtcagaaatcaagagatgaagaatgtgatagaattatcagtggtatagatcaacttttgaatcttgatatagcagcagcttttgcaggccctgttgatttgtgtacatacccgaagtactgtactgtagtagcttatccaaccgatctttacacaattcgaatgagacttgttaatcgattttacaggaggctgtctgcgttagtttgggaagtcagatatatagaacataatgccagaacatttaacgaacctgagagtgtaattgcaagatcagctaaaaagataactgaccaacttttaaaatttatcaagaatcaacactgtacaaatatctcagaactttctaacacatctgaaaatgatgagcaaaatgctgaggatttggatgatagtgatcttcctaaaacatcttctggaagaaggagagtccatgatgggaaaaaaagcatcagagctacgaactatgttgaaagcaactggaagaaacagtgtaaggaactagtgaacttaatttttcagtgtgaagattctgaaccatttagacaacctgttgatttggttgaatatccagactacagagatattatagataccccaatggattttggaacagtaagggaaactctagatgcgggaaattatgacagccctttggagttttgcaaagacatccggctgatatttagcaatgcaaaagcgtatacaccaaacaaaagatcaaagatttatagtatgaccttgagattatctgccttatttgaagaaaaaatgaagaaaatctcttctgattttaaaattggtcaaaaattcaatgaaaaacttcgaagaagccagaggttcaagcaacggcaaaattgtaaaggtgacagtcagcctaacaaaagtatcagaaacctcaagccgaagaggttaaaatctcagacaaaaataattcctgagttggtaggttctcctacccagtctacctcaagtaggacagcttatcttggaacccacaagacaagtgctggtatctcttcaggtgttacttctggtgactcttcagattcagcagaatcatcagaaaggaggaaaagaaatagacctataacaaatggttctacattatctgaaagtgaagtggaagattctttagctacctctttgtcatcgtcagcttccagtagttctgaggaaagcaaagagagttccagagctcgtgaatcctcctcacgcagtgggctatccagaagcagcaatctcagggtaaccagaactagagctgctcaaagaaaaactggtcccgtttcattagcaaatggatgtggcagaaaagccactcgaaagagagtctatttaagtgattctgataacaattcattggagactggtgaaattctaaaagccagagctggaaataaccgaaaagtcttaaggaagtgtgctgctgtggctgccaataaaataaagctaatgagtgatgtagaagagaattctagctctgaaagtgtctgttctggtcggaagctgcctcaccgcaatgcttctgctgtagctagaaaaaagttattacataattctgaagatgaacagagcttaaagtcagaaattgaagaagaggagctaaaagatgaaaatcaacyattaccagtgtccagttctcacactgcccagagcaatgttgatgaatctgaaaacagagactcagagtcagaaagtgatttgcgggtagcccggaaaaattggcatgctaatggttacaagtcccatactccagcaccttcaaagacaaaatttcttaaaatagagtcttctgaggaagactctaaaagtcatgattcagatcatgcatgtaacagaactgctggcccatcaacgtctgtgcagaaacttaaggcagagagcatctcagaggaagcagattctgaaccaggaagatctggtggtaggaaatacaatacatttcacaagaatgcgagtttctttaaaaaaaccaagattctgagtgactcagaagactctgaatctgaagagcaagatagagaagatgggaaatgtcataaaatggaaatgaacccaatttcaggaaatctgaactgtgaccctattgctatgtcccagtgttcctcagatcatggatgtgaaactgatttagattcagatgatgacaaaatagaaaaaccaaacaattttatgaaagattctgcatcacaagacaatggactaagcagaaaaatttccaggaaaagggtctgttccagtgactcagacagtagtttacaggtggttaagaaatcatcaaaagccagaacaggtctcctgaggattactcgaagatgtgcagctacggctgccaataagatcaagctcatgagtgatgtagaagatgtcagtttagaaaatgtgcacactagaagcaaaaatggaaggaaaaaacctctccatcttgcttgtactacagctaagaagaaattgagtgattgtgaaggaagtgtacattgtgaagtaccaagtgaacagtatgcctgtgaaggcaagccacctgatcctgactccgaaggtagtacaaaagtgcttagtcaggctctaaatggagactcagactctgaagatatgttgaattcagaacacaagcacaggcataccaatattcacaaaatagatgcaccttctaaaagaaaaagttcctctgttacatcttcaggagaagattcaaaaagtcatattccagggagtgagactgataggacattttcttcagagtcaaccttggcacaaaaagctactgcagagaataattttgaagtggaactgaattatgggctgcgcaggtggaatggcagaagactcaggacctatggaaaggctccttttagtaagacaaaagtgattcatgattcacaggaaacagcagagaaggaagtaaaaaggaagagatcgcatcctgaattggaaaatgtgaaaatctctgaaacaactgggaattcaaagtttagacctgatactagttccaaatcatcagatttgggatctgtaactgaatcagatattgactgtactgataatacaaaaaccaaaaggaggaaaacgaaaggaaaagcaaaagtagttagaaaaggtaaaacttttacagctaacatatctaaaactgtgagacgtcaaagacaaagcaaacgccctaggttaagtgtggatgataatgactgggaggatttggactatgcaaaatctaaaagagttcttcgacgttcaaaaataaaaacgagaaatcagggtagaaggactgtgagataccatgatggggatgatgacagaagtttagaaaatgtgttagatttcaatggttgcaccttatgaccttgagggaaagccagttcatttaagaggaaatggactggcatttatggtgaaagctggctgttaaaattatttttttgtcttacaattcagggaatatatttatatttttctatgaaaagttatgaatgtgactaaatcatgactgttatttttatttgcacttgctggtctttgtagcagcattcagcacaggtgccaaaatatgcttcattttgggggcagatctattttgacagtatttgactacatatagcaagagtttgaaatatgttaaacactagacatcctggttatcaaaaccaatgagcattactttcatggcagcaagtgtcatgcagttattttctgaatttgtcaaagaggcagtagtttctaacccctgttctatagtagttacaacaatttcacaacctatgtttacagattcttcataaatacatgcatactgacactataatcatgggaggtgtaaccatgattagtaggcgaggtacctaccactttttttttttcttcccctggctacttgagtagaatgcattataccagatctggtcactttcattgaaatggtttctaattttcttcccaagtgctgttgggtttttttcttcttaaggaaaacgttgtcacttttatgttataaacttgaatttataaagtgctggtaaattatttttaatgatttgagtgcatgttttaaacctctaggaccagagcatagtcagagcattttcttttaaattgtgcactaacaaaatgctatataatctgtcttctgtccaagatctcctggtttccattgtaagggatttaaccaaaatcttgctcttccataatcttactctgtgaaatagaggaattcgtgtgccttagatttagaagtgtgttctttaatagagtgtacagggctaaaagagtatttaagttaatatgtaggtttcccccatctgtattccaattgtagaggtgagttttgttaagagtacaattgcaaatcttatctatataggaaaatagctaaatgtcattctccatctctttgttttagtttactgcttccatgtgcaatcctaagcattctttgctggggcaactaaatgtatctttattagtgacttctagtccaaatataagaaactgtcatgttttgtgggaaaataattttataatccatttaaagtgaaagtttatcacacaaatagtacacttattttctaaccaaatacttgataggttatgctactccagtgtagatggccattcctaacttgtttgtgcctgaagatggacttgattcaaatggtttacatatttagtgggtaagggatatgttacagtaccccacctgtaagttatttattagccctaattgtgtttgatttcagacaaaattaacccttttctcctgtgtatctttgaagtggcagataaggtgaagcatcagactggtatcaatattagacaatgttatttattagccctaattgtgtttggtttcagacaaaaccttttctcctgtgtatctttgaagtggcagacaaggcgaacatcagactggtattaatgttagagaatgttctgaagtgttcctattttgtagttatctattccatttgacatagtagaaggtacattttctttctactctgatgcatggggaaggatgtttttggacattatcaactgagataggtgggaaacctcctctcatttgtggcttagagagctatcaccatttcagaactatgatgcttttcttctcagaacttgtgttaagtagatagtaaacagattgattcatgataattgtccttgactaagactgaaaagactaatgggatgccttttactttgctaattttaaaaactggtgatagatgtcaaatccattaatttatttaaactcttcttaaccttctcttttataatctgttctcaggttttaactccatgtttaccatcatttgcaaaaaggtaccaaaaaaatccataaataaatatggaatacattcataagtacatacattcttttggtataaaacaatattttgacagtttaggcttcattaatagaactattctgattatttggactgcattaattggtcattgactggccatccaattaccattttttctttcagtccaaaatagttagacccttgcatacagaagtggtattttggtttttaatcagatttggtttcatcagaagcagcaagaatggacctgatgtctttaaaagcatagccgacaatggtagcttctcaagttatgaaataaaactgagagataatggagaaaataatttttatgggtttttttggttatggtgctattcctaaggttaactttgaatatgtgacacacacactcctaagtacctttaaggaaaattaataaatcattaatagttaaaatgtttacattgagcactagaacatgtttggccttttttttctacgttatgcaaaatgcccagggatttaatgcacaggtgtactttaatgtttagggtcagtttgtagtattcttgagaaaaagataaagggttataatttgaatgtgaactgatccagaaataagtgctgtacctttccactgcacttgaagttcaacttaatggtgtatgtgaaaaacaaaaactactttggttgtgtatgtccaaagtcctatggttttattcatttatggttttacaggctttgaagtactcagatttgatttttgctttcttggaaagactcactttaccaagcatataaaggaaaaatgatttcaaacattgacaagatagatgagtgttaacaaagctttcttttttcgtgtcctccttatttaaaaaggtatacttacaatgtgaagtaacttatgaataaaaggaaaagtttatcccatattcaaataattcctaaggtcagcctccctttttgtaagtggcaaatatctgattaaatcatttctcagtttattaatccttggaaacaatgatatagcagttactcacagcttgtaaattacaacagaaaggttcctttcaaatagtagagctgcacctaaagaggaaattgggtttataagaaaatggaggcaaagaacttaagttttaagaaaaagcacttcaaaacagaagggcaaatggaaaaggggaatataaaacaaaccaataaaaataccatctgagggtgttactgtccaaaagtaaagaataagatgcatcactaagccctttgcactcgttatgacctcgtaagtaaaaattatcacttagaataaggggtgcacactacattccctctgtcttctagacttttttttttgtagaagaatcagaaaacaatttactaacctccctgtttgatattaaaaataggaagaattttaatattttctgttagtacaagttgaacttgattgtgccaactgaaaccccagaggtttgtatatcagtagaatgcaagaacattgttaaaggtgcttacgatcttttttgttttcctttccactccattgtatcaattttttgagtaacttttaaatggctagaaaatggtctttttgctttgcccttttaaagctgaaataaccagctccattcttttcatgaatagtaagttgatatatttatttatcaggtatcttgcagttgtcaccaaatactgtagttttcttatgttgtatggaaattatagttcaattattttaatgtgatggagtgcaacaagtcattgtagaacttttcacctgttaatgttgaagttatacctctgaatttctgctgtggatatcaaggaaataataaagcagaaaccccaagaaatttgcaacttaacagtttgagactgtctcttatcctagtatttgggaagagaaggaataaatttgtcaaaactaggtgagaaaatagagcattgtgggaaaaactgagtccaactagattagcaaatgttaattcctagctcaaactgtgaatagtaaggattgtaaagtatgtaatgctaagggctgtgttgtcttttcttacgattttaagttttaaaggctgttaaattacagagatgttgcccaaggatacatggggattctcaaaagtaagagatttttacctttttcataatctgccaagctggttcctaatatattgttaaattggtagaaaaatatctttaaattggtgtctgctcaagaattgcttttctagatttgatggagggagggggagagtcacatcatttggattctaccaatctgcaggctctatctttggcaacatgtaaataattagactatacatctgtttctcaagtatggcaagaccaatagtttgaatttaattatcaatgctatggtatactttctggtcatattttagttatgtcagttttaaggtaagttttttcatttattaaagcccttaaatgagattttagactgccaaagagaagaggcagtccaattgacctaactgaaatgagatgaccagtatatagagcctagatggactgtagcagctctacccctttgttttacaaggtaaatcattttaaaaattaccttttttgatcagtgggtaaaagttaaagggatctttaatttttgatatattcaagttaattttctaaatgtgaatcagtccttggactgcaactatatattcacctacaaaatcccaatcaaaaaattacatgagcctgtcaagcagatctttagttttccacttcacataagatcgttaatgttctaaattaatctattcatttagatgatttttgtcagttcttaaatgggatataataaatttagcattttcatcttaacaagcaaaagagttaaaaaacaaaacaaaacactactccaagccaaatacattctagctggttaattccagacttgtcccaagtggttccccaacctcttttccactggtaatttcttttcatgcaggcagaatataggggtgcgagcgctgtgagttttacatatgagcttggataggggaactgaagcgagtcaggagccctgctggaaaaggggtttgccattggattgtctgtggcctggtttctttccagtagtacagtaatagggtagattgaaaacaagtatttacttctgattctgcctgcatttagtgtgaaatgctcttaaggtattgcttctaaaaagcaaattaagcagttaagtataaagtccctgaattcatatttcaaaataaggcttttatgagatttttattaaaaattgcaatagccatcacaaatctgagtttttctaggggtgagagaaaactgtattgtgatgagctagattagttgtagttccagaataagaacaaaaattcagagttgtgtggtgcccatcattgagtaaatgaaccctaaaaatgaataagctaatgaactagttcatggaattatttctgatggtcttttgacctgatgctgccatactgcagtgttaccagctccccctagaaaacggaactgtttaaaaacacagcaagttacagaaaccattttattctacagccattggggtacttcagtttatgggatgtttttggaaacttctgctttgggagggatgaagatcattgataaatgttatttgctttctgagttttggggtcatttcattgcttatcaatgaagggcagacagaggagagaatatctcaagtcttttctgataaaaggcttgcttgagggagcttataacttgcacctagagggtttacccactttgtggatttgatttatccaccaaccacagcaaccaataatgtcaagattctaggagtttatgaaagaggctagtatgttttcattttgagtcagacattcttttctcattctcaaatctgttttaaatgctccaattttaaaaatgccaatgaaaattttataatgcttctgtagtaaccatatgcagtttactttgaatttaggaaaacagttttgtatgatgaaatattgtgcagaatctgtaaataaggtagcttaaaaaaaaaaaaaaagtctaattagaatatgattaatccttaaaatgtagaaactagagattgtgttgagtcagaactgttatgtttgtatccaggtttctattcaccacatataccatcttagaatacacacatatctgtgagttataatttaaagtggtcatccagggaaatgatcatggagtgctactacagatgtacagttttacactactgatgtgttcttgccatacccaagtagggaatcacttccaggaaaacaagtcctcaagcactcaatgactttgtaaacccatgactgaaacaagactcatctgaggcagtaggactggtgggattctactgacttcttagtatcacatggcaccatcacaaatgcattgttagagcagcaacatccagagttcttaagcttgtaccctaacacacaaatttgacttctaaccctgaaatatcctatatatatttctaaaactgtttgtagttttcttgagaaaaagcactttataatttactcagttttcagtaataaaattaacactgacttgaatgtatttaaaaaaattctccacagttttgtcttcctcagattgtttttatccttattctctgaaattcctgttttattgtctaagacttaagagattcagctttatcaagttagagtacagtgtaattcaaattctccctcccttgggcatagttactgaagttcaaatttccttaagtattttttaaaaacctgattttagttttttttttcctgcagaatcttaacttttccattattctggatgacaaataaacatttattaaaatgtgttagaattagtatttactaggttcctaaattgtcagtataggtactttgatcacacatcaaaatggaatttctgcaacttaaagcattttgttacaaattgtagttgaaatagaattttatctatttgtctggatgaataggttgttgggaatgaaccagttatctgttcttttcttccaaatgcaaatggtgcagctagttgataatagtatattctcatcctactataaagtgcaaatttcaccttaattttgcatattttaaaatttttgtttaccctttgtagcatatttacattttagcatttgctaacattgatttaatgtgttaaagattcattttggatatagggttgacttgttggagatactagttcataattttaaaattcccaagagaagtgtctttgaagtggtaaacacagtgcactttaagccacttctcttcccacagagtccagctgaaggaggtaagggcatgctgcatgagagtaatgccgtgatgagtgtcttactctggtaaaatgccatttacaatgcctggagactgaacactgaacaaaacatagtgcccttagaatttcactggaaaaacatgtgaatcacataagttagttggcaaaaggaactgatgtgtatgtggtggggttgctttgaataaagtatttcctaacctattctggggagaacgctcaactgatcttagagaagtgtgaaatcagtttcatagacttagggaaaaatctgaagtgcttgcactgtgagggcagaggcctgcctcattagtctagctgtatgaacatgtcagtccacagaagcagtttttacctgtactcatctgcccttcagtcagctttgtgacagaagggcaaacatcttcacagaagaaaaagttcagaaggttggcattggtggtttcattgctacagaataatagtgttacttgatagtatctgactaaaagagctctcattttctagtacttagtagtaaaaagaatgtggtggagtcctccagatgtctagtgtgggtggaggatatcaactggttatttcagtgatctacagccttaccttttgaatgctaaatgtctggaaacttcaggcagggtcctacaaaacaaactgccatcaagattggtgtgtaccatgaaggcagttttagatagtttgactgttcatggctgcaagaaagacctaaaattcaagggcccgtgaacttcagatacgtaaaaggaatatcacttctgttctagaagagtactaattagacttgtttgtgaaatttgaaaatttggctttgagacactggtaacaaacatatctgagccctcctaagtttggtcagcacggagtagtagctctggcatcatgtggctgtgtagagctccagtgtgatttcaagccccctctaaaaactgccttagtctgcatgaagtagttaactctccaaagtgctttttgtctggcaaatcccttcacaattttcacctctcgtctaaaagcttccttaaaggaagccttccttgatcccttaggctaggttaggtttccagtctgtgttctcatagcactctgcactttttggttccttaaagcaactctgtgttattttttagaattttaatctgaatctcgtgtgtcacatacctaggtcagaaaatactggaacaatgaagttaagatttagtaattcaaattatgtaaaatgctcatatatatgtttttagattagcagctttatgatgccgatgctgaaggaacttttcaccccattcttacaagtctgctactgttttaagtgacatccttatagttgtagataagcaaatgtaaggttatatcaatgtgaagaagcccttagtatcacattttaaaatttatcatttagcaatatgacttttaaatttattgtttccgaatgagtgttgttgaggaatgttagcagtagtaaaatcttgtgttacaagatttttgcatttacatgaactttcactcatttttcagaatttgttcctagagacagagaacccaatacaaaagtgagaacatgtatgcataatcagaaggatgcagtgcagatgcctagtgaaactctgaaagcaaaaatggtacctgagaaagttccccgcagatgtgctactgttgctgcaaataaaataaagataatgagtaatctaaaagaaacgatctcaggaccagaaaatgtctggattaggaagagtagcagaaaactgccccatcgaaatgcttctgctgcggctaagaaaaaattactgaatgtttataaagaggatgatacaaccataaattctgaaagtgaaaaagagctagaagatattaatagaaaaatgctttttttaagggggttcagatcctggaaagaaaatgcacaatagtgactatgagaatgtagaagtggcatctgaaaacaattggtacacaagtaaactggcagttacattctgctcccagctctaaaattactcccttattggcatctttggaggaattttctaaaagccataatccagtgggttcctcccagtcagctcttgtacagacatgtgctctggggaattctgaggaggaaataaattgcagagtctgtaggtggagaggtggaaagaaaagacaaatggcctgctataagactactattcctttccagaatgcaaggccttgaagacatgattccttagaggaagaatataatgggaagtgtacaggctaggaagaacttgaagtgaacaaatttcaaaatcttaacctgatgctaattttcagggttctccattacagtgtaaaaattcagaccacgacaactatggtgtcatgaggaaaaaaaatcaggcatttttccaaaggaagtgctaatgggcctatttgacttctgagtgaagcaaaaactacccagatccattccctacaattcacatccccaaaggtcaaaaacaaactaggaggacctgggaatttcagctggagatactgattattgagttctgaagtagagtgttggaaataggcaattagagaaagtccattgatgtcattttgtttataatattgcagttcatactgaatgaccacttgatatgactaattcagggaatatatatttttctatgaaagctatgaatgttactatcacggcttttccttatttttacttgtatgtagcagcatttacagaaatgccaaaaatgtgcctcattaagaggcaggtcttaatcagttagataaaaataaaatgtatagcttaagatcaaaacagtcatatttttagatacagtgaaatcttttatgtttctctacagcaccttaaaaattagaacttgaatactttgagtaaacttactacaatctcatcccaacaaactttaatggtagcatgtttggcctatttcattgtggcctgtactaggattagaaaatttggtcgtggtataacaaagaagtgtatttacaataggatttaatttgttgttaatatgtatttgttgaaattaaaattgccagattaaatgaatatactgtcgcatctttttaacatagtaacgtgttactggaaaaattaagttgttgaaagtaagttgttttcccatttaaaaatatctgaatatatgatttgcatgtgtaaatctgaaaaactaaactacagaaacctagggttttctatttcttttttaagtcaaatgcatttttttttttgttatacagatgaaccaagtgtctaaaatacttgagaaatttgtggttgcatgtctgttttaaaaaaaaggctttttgttttttagcataagccagaatattctaacctactaagtctgtgtcctttgctccttttgtagtatactttcatctaaattactgatcccaatatgttgatacacaggtgagaaggaagaattcctaataaactgctattacttttaggtgcatggggtttgatttttgagctctaatgaaatgcttaaacttctttccagttcaaattttacacttaatttataatatttattgagtatattatgtcctcaacaagtaactataaaatgaaatacttaactcggtgaagactattttatgcaaagtttttttttttttttttttttttttttagcaatttcagtgtaatgaaagaatttaagctttgaatttataatttgctgtggtggggttaatttctgtcagtatttgagattgtattatcagtcttgcataatgaaatccttttttggctaagtatttaattcgaacatatttgcctttttaaaaagtgcttggcctaaacttattgtaactgcatgaaataagcatttgcttaaaacttaacattgtaaaattgttctctctgaaatgtgtgcagaatttaaatcatggccaaatgtattactattaccctatttacagtaatttgctttgcagaaaatatttcttcatcatggaactgtgaaatcaaattgaagatcttactggtaaaaatgacaaattaacaaaaggactaagacaagtggtgcccaaacaacctttttattctgcagttccatcatcataatagaccagttaacccaggagtcctaatgttttaaaacatcattgtggtgatcttgtttattctatctcactaaggatatccagtttcctaagctcttactggctagcaatttcgtcttaattttattgctaaatgttcaaattttgcttccaaactcactttatttttgcagatgtgtacatctgctaaatactaattttatgtaaatgattttgttgattatctttccacatcttaaaatgtttctaacagctttgagattttatctcaacaggctctctctgaccccaaagtagtacttaccttcgtgactactgacaaagtcacaaaatgcaggcgatgtcatgtatttcggtacaactaaatctaggaaacggttttttcattgcattactgcatattttcattttcatttaaattatgtcccctttttctcttgcttgaaacagtgctcctcgaactttgtcttccagcacattttaaagagaaccaattaaagaacaatcacacattctgcttattaaaggctatttaaaaagaaacattttgtattagaaaatggccaactttaaaacactattttttacactcataaaaatgttttttaaatcgccttgacaatcatcagcttttgaaatgtgaattcctattgccagagtaaaggtctcgtttttatacca

SEQ ID NO: 26 - DNA, 13365 bp, Homo sapien
atactaataggtgtgtaccattccattcactgcaatacccccttcaaattaatacgaattctgaacttgtttttaatattgaacatataattcctttagacttacaaaagattaatagaaatctgctctttaacttttagattctgcatcacaagacaatggactaagcagaaaaatttccaggaaaagggtctgttccagtgactcagacagtagtttacaggtggttaagaaatcatcaaaagccagaacaggtctcctgaggattactcgaagatgtgcagctacggctgccaataagatcaagctcatgagtgatgtagaagatgtcagtttagaaaatgtgcacactagaagcaaaaatggaaggaaaaaacctctccatcttgcttgtactacagctaagaagaaattgagtgattgtgaaggaagtgtacattgtgaagtaccaagtgaacagtatgcctgtgaaggcaagccacctgatcctgactccgaaggtagtacaaaagtgcttagtcaggctctaaatggagactcagactctgaagatatgttgaattcagaacacaagcacaggcataccaatattcacaaaatagatgcaccttctaaaagaaaaagttcctctgttacatcttcaggagaagattcaaaaagtcatattccagggagtgagactgataggacattttcttcagagtcaaccttggcacaaaaagctactgcagagaataattttgaagtggaactgaattatgggctgcgcaggtggaatggcagaagactcaggacctatggaaaggctccttttagtaagacaaaagtgattcatgattcacaggaaacagcagagaaggaagtaaaaaggaagagatcgcatcctgaattggaaaatgtgaaaatctctgaaacaactgggaattcaaagtttagacctgatactagttccaaatcatcagatttgggatctgtaactgaatcagatattgactgtactgataatacaaaaaccaaaaggaggaaaacgaaaggaaaagcaaaagtagttagaaaaggtaaaacttttacagctaacatatctaaaactgtgagacgtcaaagacaaagcaaacgccctaggttaagtgtggatgataatgactgggaggatttggactatgcaaaatctaaaagagttcttcgacgttcaaaaataaaaacgagaaatcagggtagaaggactgtgagataccatgatggggatgatgacagaagtttagaaaatgtgttagatttcaatggttgcaccttatgaccttgagggaaagccagttcatttaagaggaaatggactggcatttatggtgaaagctggctgttaaaattatttttttgtcttacaattcagggaatatatttatatttttctatgaaaagttatgaatgtgactaaatcatgactgttatttttatttgcacttgctggtctttgtagcagcattcagcacaggtgccaaaatatgcttcattttgggggcagatctattttgacagtatttgactacatatagcaagagtttgaaatatgttaaacactagacatcctggttatcaaaaccaatgagcattactttcatggcagcaagtgtcatgcagttattttctgaatttgtcaaagaggcagtagtttctaacccctgttctatagtagttacaacaatttcacaacctatgtttacagattcttcataaatacatgcatactgacactataatcatgggaggtgtaaccatgattagtaggcgaggtacctaccactttttttttttcttcccctggctacttgagtagaatgcattataccagatctggtcactttcattgaaatggtttctaattttcttcccaagtgctgttgggtttttttcttcttaaggaaaacgttgtcacttttatgttataaacttgaatttataaagtgctggtaaattatttttaatgatttgagtgcatgttttaaacctctaggaccagagcatagtcagagcattttcttttaaattgtgcactaacaaaatgctatataatctgtcttctgtccaagatctcctggtttccattgtaagggatttaaccaaaatcttgctcttccataatcttactctgtgaaatagaggaattcgtgtgccttagatttagaagtgtgttctttaatagagtgtacagggctaaaagagtatttaagttaatatgtaggtttcccccatctgtattccaattgtagaggtgagttttgttaagagtacaattgcaaatcttatctatataggaaaatagctaaatgtcattctccatctctttgttttagtttactgcttccatgtgcaatcctaagcattctttgctggggcaactaaatgtatctttattagtgacttctagtccaaatataagaaactgtcatgttttgtgggaaaataattttataatccatttaaagtgaaagtttatcacacaaatagtacacttattttctaaccaaatacttgataggttatgctactccagtgtagatggccattcctaacttgtttgtgcctgaagatggacttgattcaaatggtttacatatttagtgggtaagggatatgttacagtaccccacctgtaagttatttattagccctaattgtgtttgatttcagacaaaattaacccttttctcctgtgtatctttgaagtggcagataaggtgaagcatcagactggtatcaatattagacaatgttatttattagccctaattgtgtttggtttcagacaaaaccttttctcctgtgtatctttgaagtggcagacaaggcgaacatcagactggtattaatgttagagaatgttctgaagtgttcctattttgtagttatctattccatttgacatagtagaaggtacattttctttctactctgatgcatggggaaggatgtttttggacattatcaactgagataggtgggaaacctcctctcatttgtggcttagagagctatcaccatttcagaactatgatgcttttcttctcagaacttgtgttaagtagatagtaaacagattgattcatgataattgtccttgactaagactgaaaagactaatgggatgccttttactttgctaattttaaaaactggtgatagatgtcaaatccattaatttatttaaactcttcttaaccttctcttttataatctgttctcaggttttaactccatgtttaccatcatttgcaaaaaggtaccaaaaaaatccataaataaatatggaatacattcataagtacatacattcttttggtataaaacaatattttgacagtttaggcttcattaatagaactattctgattatttggactgcattaattggtcattgactggccatccaattaccattttttctttcagtccaaaatagttagacccttgcatacagaagtggtattttggtttttaatcagatttggtttcatcagaagcagcaagaatggacctgatgtctttaaaagcatagccgacaatggtagcttctcaagttatgaaataaaactgagagataatggagaaaataatttttatgggtttttttggttatggtgctattcctaaggttaactttgaatatgtgacacacacactcctaagtacctttaaggaaaattaataaatcattaatagttaaaatgtttacattgagcactagaacatgtttggccttttttttctacgttatgcaaaatgcccagggatttaatgcacaggtgtactttaatgtttagggtcagtttgtagtattcttgagaaaaagataaagggttataatttgaatgtgaactgatccagaaataagtgctgtacctttccactgcacttgaagttcaacttaatggtgtatgtgaaaaacaaaaactactttggttgtgtatgtccaaagtcctatggttttattcatttatggttttacaggctttgaagtactcagatttgatttttgctttcttggaaagactcactttaccaagcatataaaggaaaaatgatttcaaacattgacaagatagatgagtgttaacaaagctttcttttttcgtgtcctccttatttaaaaaggtatacttacaatgtgaagtaacttatgaataaaaggaaaagtttatcccatattcaaataattcctaaggtcagcctccctttttgtaagtggcaaatatctgattaaatcatttctcagtttattaatccttggaaacaatgatatagcagttactcacagcttgtaaattacaacagaaaggttcctttcaaatagtagagctgcacctaaagaggaaattgggtttataagaaaatggaggcaaagaacttaagttttaagaaaaagcacttcaaaacagaagggcaaatggaaaaggggaatataaaacaaaccaataaaaataccatctgagggtgttactgtccaaaagtaaagaataagatgcatcactaagccctttgcactcgttatgacctcgtaagtaaaaattatcacttagaataaggggtgcacactacattccctctgtcttctagacttttttttttgtagaagaatcagaaaacaatttactaacctccctgtttgatattaaaaataggaagaattttaatattttctgttagtacaagttgaacttgattgtgccaactgaaaccccagaggtttgtatatcagtagaatgcaagaacattgttaaaggtgcttacgatcttttttgttttcctttccactccattgtatcaattttttgagtaacttttaaatggctagaaaatggtctttttgctttgcccttttaaagctgaaataaccagctccattcttttcatgaatagtaagttgatatatttatttatcaggtatcttgcagttgtcaccaaatactgtagttttcttatgttgtatggaaattatagttcaattattttaatgtgatggagtgcaacaagtcattgtagaacttttcacctgttaatgttgaagttatacctctgaatttctgctgtggatatcaaggaaataataaagcagaaaccccaagaaatttgcaacttaacagtttgagactgtctcttatcctagtatttgggaagagaaggaataaatttgtcaaaactaggtgagaaaatagagcattgtgggaaaaactgagtccaactagattagcaaatgttaattcctagctcaaactgtgaatagtaaggattgtaaagtatgtaatgctaagggctgtgttgtcttttcttacgattttaagttttaaaggctgttaaattacagagatgttgcccaaggatacatggggattctcaaaagtaagagatttttacctttttcataatctgccaagctggttcctaatatattgttaaattggtagaaaaatatctttaaattggtgtctgctcaagaattgcttttctagatttgatggagggagggggagagtcacatcatttggattctaccaatctgcaggctctatctttggcaacatgtaaataattagactatacatctgtttctcaagtatggcaagaccaatagtttgaatttaattatcaatgctatggtatactttctggtcatattttagttatgtcagttttaaggtaagttttttcatttattaaagcccttaaatgagattttagactgccaaagagaagaggcagtccaattgacctaactgaaatgagatgaccagtatatagagcctagatggactgtagcagctctacccctttgttttacaaggtaaatcattttaaaaattaccttttttgatcagtgggtaaaagttaaagggatctttaatttttgatatattcaagttaattttctaaatgtgaatcagtccttggactgcaactatatattcacctacaaaatcccaatcaaaaaattacatgagcctgtcaagcagatctttagttttccacttcacataagatcgttaatgttctaaattaatctattcatttagatgatttttgtcagttcttaaatgggatataataaatttagcattttcatcttaacaagcaaaagagttaaaaaacaaaacaaaacactactccaagccaaatacattctagctggttaattccagacttgtcccaagtggttccccaacctcttttccactggtaatttcttttcatgcaggcagaatataggggtgcgagcgctgtgagttttacatatgagcttggataggggaactgaagcgagtcaggagccctgctggaaaaggggtttgccattggattgtctgtggcctggtttctttccagtagtacagtaatagggtagattgaaaacaagtatttacttctgattctgcctgcatttagtgtgaaatgctcttaaggtattgcttctaaaaagcaaattaagcagttaagtataaagtccctgaattcatatttcaaaataaggcttttatgagatttttattaaaaattgcaatagccatcacaaatctgagtttttctaggggtgagagaaaactgtattgtgatgagctagattagttgtagttccagaataagaacaaaaattcagagttgtgtggtgcccatcattgagtaaatgaaccctaaaaatgaataagctaatgaactagttcatggaattatttctgatggtcttttgacctgatgctgccatactgcagtgttaccagctccccctagaaaacggaactgtttaaaaacacagcaagttacagaaaccattttattctacagccattggggtacttcagtttatgggatgtttttggaaacttctgctttgggagggatgaagatcattgataaatgttatttgctttctgagttttggggtcatttcattgcttatcaatgaagggcagacagaggagagaatatctcaagtcttttctgataaaaggcttgcttgagggagcttataacttgcacctagagggtttacccactttgtggatttgatttatccaccaaccacagcaaccaataatgtcaagattctaggagtttatgaaagaggctagtatgttttcattttgagtcagacattcttttctcattctcaaatctgttttaaatgctccaattttaaaaatgccaatgaaaattttataatgcttctgtagtaaccatatgcagtttactttgaatttaggaaaacagttttgtatgatgaaatattgtgcagaatctgtaaataaggtagcttaaaaaaaaaaaaaaagtctaattagaatatgattaatccttaaaatgtagaaactagagattgtgttgagtcagaactgttatgtttgtatccaggtttctattcaccacatataccatcttagaatacacacatatctgtgagttataatttaaagtggtcatccagggaaatgatcatggagtgctactacagatgtacagttttacactactgatgtgttcttgccatacccaagtagggaatcacttccaggaaaacaagtcctcaagcactcaatgactttgtaaacccatgactgaaacaagactcatctgaggcagtaggactggtgggattctactgacttcttagtatcacatggcaccatcacaaatgcattgttagagcagcaacatccagagttcttaagcttgtaccctaacacacaaatttgacttctaaccctgaaatatcctatatatatttctaaaactgtttgtagttttcttgagaaaaagcactttataatttactcagttttcagtaataaaattaacactgacttgaatgtatttaaaaaaattctccacagttttgtcttcctcagattgtttttatccttattctctgaaattcctgttttattgtctaagacttaagagattcagctttatcaagttagagtacagtgtaattcaaattctccctcccttgggcatagttactgaagttcaaatttccttaagtattttttaaaaacctgattttagttttttttttcctgcagaatcttaacttttccattattctggatgacaaataaacatttattaaaatgtgttagaattagtatttactaggttcctaaattgtcagtataggtactttgatcacacatcaaaatggaatttctgcaacttaaagcattttgttacaaattgtagttgaaatagaattttatctatttgtctggatgaataggttgttgggaatgaaccagttatctgttcttttcttccaaatgcaaatggtgcagctagttgataatagtatattctcatcctactataaagtgcaaatttcaccttaattttgcatattttaaaatttttgtttaccctttgtagcatatttacattttagcatttgctaacattgatttaatgtgttaaagattcattttggatatagggttgacttgttggagatactagttcataattttaaaattcccaagagaagtgtctttgaagtggtaaacacagtgcactttaagccacttctcttcccacagagtccagctgaaggaggtaagggcatgctgcatgagagtaatgccgtgatgagtgtcttactctggtaaaatgccatttacaatgcctggagactgaacactgaacaaaacatagtgcccttagaatttcactggaaaaacatgtgaatcacataagttagttggcaaaaggaactgatgtgtatgtggtggggttgctttgaataaagtatttcctaacctattctggggagaacgctcaactgatcttagagaagtgtgaaatcagtttcatagacttagggaaaaatctgaagtgcttgcactgtgagggcagaggcctgcctcattagtctagctgtatgaacatgtcagtccacagaagcagtttttacctgtactcatctgcccttcagtcagctttgtgacagaagggcaaacatcttcacagaagaaaaagttcagaaggttggcattggtggtttcattgctacagaataatagtgttacttgatagtatctgactaaaagagctctcattttctagtacttagtagtaaaaagaatgtggtggagtcctccagatgtctagtgtgggtggaggatatcaactggttatttcagtgatctacagccttaccttttgaatgctaaatgtctggaaacttcaggcagggtcctacaaaacaaactgccatcaagattggtgtgtaccatgaaggcagttttagatagtttgactgttcatggctgcaagaaagacctaaaattcaagggcccgtgaacttcagatacgtaaaaggaatatcacttctgttctagaagagtactaattagacttgtttgtgaaatttgaaaatttggctttgagacactggtaacaaacatatctgagccctcctaagtttggtcagcacggagtagtagctctggcatcatgtggctgtgtagagctccagtgtgatttcaagccccctctaaaaactgccttagtctgcatgaagtagttaactctccaaagtgctttttgtctggcaaatcccttcacaattttcacctctcgtctaaaagcttccttaaaggaagccttccttgatcccttaggctaggttaggtttccagtctgtgttctcatagcactctgcactttttggttccttaaagcaactctgtgttattttttagaattttaatctgaatctcgtgtgtcacatacctaggtcagaaaatactggaacaatgaagttaagatttagtaattcaaattatgtaaaatgctcatatatatgtttttagattagcagctttatgatgccgatgctgaaggaacttttcaccccattcttacaagtctgctactgttttaagtgacatccttatagttgtagataagcaaatgtaaggttatatcaatgtgaagaagcccttagtatcacattttaaaatttatcatttagcaatatgacttttaaatttattgtttccgaatgagtgttgttgaggaatgttagcagtagtaaaatcttgtgttacaagatttttgcatttacatgaactttcactcatttttcagaatttgttcctagagacagagaacccaatacaaaagtgagaacatgtatgcataatcagaaggatgcagtgcagatgcctagtgaaactctgaaagcaaaaatggtacctgagaaagttccccgcagatgtgctactgttgctgcaaataaaataaagataatgagtaatctaaaagaaacgatctcaggaccagaaaatgtctggattaggaagagtagcagaaaactgccccatcgaaatgcttctgctgcggctaagaaaaaattactgaatgtttataaagaggatgatacaaccataaattctgaaagtgaaaaagagctagaagatattaatagaaaaatgctttttttaagggggttcagatcctggaaagaaaatgcacaatagtgactatgagaatgtagaagtggcatctgaaaacaattggtacacaagtaaactggcagttacattctgctcccagctctaaaattactcccttattggcatctttggaggaattttctaaaagccataatccagtgggttcctcccagtcagctcttgtacagacatgtgctctggggaattctgaggaggaaataaattgcagagtctgtaggtggagaggtggaaagaaaagacaaatggcctgctataagactactattcctttccagaatgcaaggccttgaagacatgattccttagaggaagaatataatgggaagtgtacaggctaggaagaacttgaagtgaacaaatttcaaaatcttaacctgatgctaattttcagggttctccattacagtgtaaaaattcagaccacgacaactatggtgtcatgaggaaaaaaaatcaggcatttttccaaaggaagtgctaatgggcctatttgacttctgagtgaagcaaaaactacccagatccattccctacaattcacatccccaaaggtcaaaaacaaactaggaggacctgggaatttcagctggagatactgattattgagttctgaagtagagtgttggaaataggcaattagagaaagtccattgatgtcattttgtttataatattgcagttcatactgaatgaccacttgatatgactaattcagggaatatatatttttctatgaaagctatgaatgttactatcacggcttttccttatttttacttgtatgtagcagcatttacagaaatgccaaaaatgtgcctcattaagaggcaggtcttaatcagttagataaaaataaaatgtatagcttaagatcaaaacagtcatatttttagatacagtgaaatcttttatgtttctctacagcaccttaaaaattagaacttgaatactttgagtaaacttactacaatctcatcccaacaaactttaatggtagcatgtttggcctatttcattgtggcctgtactaggattagaaaatttggtcgtggtataacaaagaagtgtatttacaataggatttaatttgttgttaatatgtatttgttgaaattaaaattgccagattaaatgaatatactgtcgcatctttttaacatagtaacgtgttactggaaaaattaagttgttgaaagtaagttgttttcccatttaaaaatatctgaatatatgatttgcatgtgtaaatctgaaaaactaaactacagaaacctagggttttctatttcttttttaagtcaaatgcatttttttttttgttatacagatgaaccaagtgtctaaaatacttgagaaatttgtggttgcatgtctgttttaaaaaaaaggctttttgttttttagcataagccagaatattctaacctactaagtctgtgtcctttgctccttttgtagtatactttcatctaaattactgatcccaatatgttgatacacaggtgagaaggaagaattcctaataaactgctattacttttaggtgcatggggtttgatttttgagctctaatgaaatgcttaaacttctttccagttcaaattttacacttaatttataatatttattgagtatattatgtcctcaacaagtaactataaaatgaaatacttaactcggtgaagactattttatgcaaagtttttttttttttttttttttttttttagcaatttcagtgtaatgaaagaatttaagctttgaatttataatttgctgtggtggggttaatttctgtcagtatttgagattgtattatcagtcttgcataatgaaatccttttttggctaagtatttaattcgaacatatttgcctttttaaaaagtgcttggcctaaacttattgtaactgcatgaaataagcatttgcttaaaacttaacattgtaaaattgttctctctgaaatgtgtgcagaatttaaatcatggccaaatgtattactattaccctatttacagtaatttgctttgcagaaaatatttcttcatcatggaactgtgaaatcaaattgaagatcttactggtaaaaatgacaaattaacaaaaggactaagacaagtggtgcccaaacaacctttttattctgcagttccatcatcataatagaccagttaacccaggagtcctaatgttttaaaacatcattgtggtgatcttgtttattctatctcactaaggatatccagtttcctaagctcttactggctagcaatttcgtcttaattttattgctaaatgttcaaattttgcttccaaactcactttatttttgcagatgtgtacatctgctaaatactaattttatgtaaatgattttgttgattatctttccacatcttaaaatgtttctaacagctttgagattttatctcaacaggctctctctgaccccaaagtagtacttaccttcgtgactactgacaaagtcacaaaatgcaggcgatgtcatgtatttcggtacaactaaatctaggaaacggttttttcattgcattactgcatattttcattttcatttaaattatgtcccctttttctcttgcttgaaacagtgctcctcgaactttgtcttccagcacattttaaagagaaccaattaaagaacaatcacacattctgcttattaaaggctatttaaaaagaaacattttgtattagaaaatggccaactttaaaacactattttttacactcataaaaatgttttttaaatcgccttgacaatcatcagcttttgaaatgtgaattcctattgccagagtaaaggtctcgtttttatacca

SEQ ID NO: 27 - DNA, 9480 bp, Homo sapien
ggtccaggcggcgcgcacggtatggcggcggcggcggcggcggcggcggcgcgcgcctgagaagaggggacgccagcccggtcaggcctcggcgcggcctacacgctccgctcgctcgctcgctcccgcctcccgccccgcgcccggccatggcggagccgtcgtccgcccgacgcccggtgcctctcatcgagtcggagctgtacttccttatcgcccggtacctatcggcgggcccgtgtcggagagcggcccaggtgctggtgcaggagctggagcagtaccagttgttgccgaagagattggactgggagggcaacgagcacaacaggagctacgaggagttggtcttgtccaataagcatgtggctcctgatcatcttttgcaaatctgccagcgcatcggtcctatgttggataaagaaattccacccagtatttcaagagtcacttctttacttggtgcaggaaggcagtctttgctacgtacagcaaaagactgcaggcacacagtttggaagggctctgcctttgctgctcttcatagaggaagacctcctgaaatgccagtgaattatggttccccaccaaatcttgtggagatacatcgaggaaaacaactcacagggtgttccacttttagtacagcatttccaggaactatgtatcagcatataaaaatgcacagaaggattctcggacatctatctgctgtttactgtgtagcatttgataggacaggacatagaatctttacaggttcagatgactgtttggtaaagatttggtcaacacataatggccgcttgttatctacattaagaggtcattctgcagaaatttcagatatggcagtaaactatgagaatacaatgattgctgcggggagctgtgataaaattattagagtgtggtgcttgagaacttgtgccccagttgctgtgctccaaggacacacaggatcaattacatctttacagtttagcccgatggccaaaggctctcaaagatacatggtttccactggtgctgatgggacagtttgcttttggcaatgggatttagaatccttaaaatttagcccacgtcccctgaagttcactgaaaagcctaggccaggcgttcaaatgctttgttcttcttttagtgttggtggtatgtttttagccacaggtagtactgatcatgtaatcagaatgtattttttgggttttgaagcacccgaaaaaatcgcagaacttgaaagccacactgataaagtagatagtatccaattttgtaacaatggtgatcggttcctaagtggtagcagagatggaacagcacggatttggagatttgagcagttagaatggaggagcattttattggatatggctaccagaatctcaggggacttatcttccgaagaggaaaggtttatgaaacctaaagtaacaatgatagcttggaatcaaaatgatagcattgttgtcacagctgtgaatgatcatgtcctcaaagtgtggaattcttacactggacaactgcttcataacttaatgggacatgctgatgaagtatttgttctggagacacatccctttgattccagaattatgttatctgcaggacatgatggcagcatatttatatgggatattacaaaaggtaccaagatgaaacattattttaatatgattgaaggacaaggacatggagctgtgtttgactgtaagttttcacaggatggacagcattttgcctgtacagattctcatgggcaccttctgatatttggttttggatgcagcaaaccatatgaaaagattcctgatcagatgttcttccatactgactatcgaccacttattagagattctaataattatgtcttagatgagcaaactcagcaggctcctcatcttatgcctccaccattcttggtagatgtagatggaaatcctcatccaaccaagtatcagagattagtaccaggccgagaaaattctgcagatgaacatttgattccacagctgggctatgtggcaacaagtgatggagaggtgattgaacaaattataagcctgcaaaccaatgataatgatgaacgcagcccagaatcgagtattcttgatggaatgataagacagttgcagcagcagcaagatcagagaatgggagcagatcaggatactattccaagaggactttcaaatggtgaagaaacaccccggagaggttttagaaggctgagcttagacattcagtcccctccaaatattggtctgcgtcgtagtggacaagttgaaggtgttcgtcagatgcatcaaaacgctccacgcagtcagattgctacagaacgtgacctgcaggcttggaaacgaagagtggttgtaccagaggtaccactaggcatatttaggaagctggaagacttccgattagagaaaggtgaagaggaaagaaatctttatataataggaagaaaaagaaagactcttcagctctcacataagtcggattcagtggttttggtatcacagtctagacaaaggacatgtaggcgtaaatatccaaattatggtagaagaaatcgtagctggcgtgagttatcttctggaaatgagtcttcaagctctgtaagacatgagacttcctgtgatcagagtgaaggttctggttcttcagaagaggatgaatggagaagtgacagaaaaagtgagagttacagcgaaagttcaagtgactcttcatctagatattccgattggacagctgatgcgggcatcaatttgcagcctcctttaagaacatcatgtcgtcgacgaattactcgattttgtagtagttcagaagatgaaatatctactgagaatttatctcctccaaaaagaagacgaaagagaaagaaagaaaataagcctaagaaggagaatttgcggaggatgactccagcagagcttgcaaatatggagcatttatatgaatttcaccctccagtttggattactgacaccacacttagaaaatctccttttgttcctcaaatgggtgatgaggtaatatattttcgacagggtcatgaagcttatattgaggctgtaagaagaaataatatttatgaactgaaccctaataaggagccatggagaaaaatggatcttagggatcaagaattggttaaaatagttggaatacgatatgaagttgggccccctacactctgttgcctaaaactagcatttatagatccagcaactggaaaacttatggacaaatctttctctattagatatcatgatatgccagatgttattgactttcttgtattgcgtcaattttatgatgaagcaagacagaggaattggcagtcttgtgacagattccgctctattattgatgatgcttggtggtttggaacagtgttaagtcaagagccatatcaaccacagtatcctgatagtcatttccagtgttatattgttaggtgggataatactgaaattgaaaaacttagcccatgggacatggaaccaattcctgataatgttgatccacctgaagaattaggagctagtatttctgtcacaacagatgagctagagaaattgctctataaaccacaagctggtgaatggggtcagaaatcaagagatgaagaatgtgatagaattatcagtggtatagatcaacttttgaatcttgatatagcagcagcttttgcaggccctgttgatttgtgtacatacccgaagtactgtactgtagtagcttatccaaccgatctttacacaattcgaatgagacttgttaatcgattttacaggaggctgtctgcgttagtttgggaagtcagatatatagaacataatgccagaacatttaacgaacctgagagtgtaattgcaagatcagctaaaaagataactgaccaacttttaaaatttatcaagaatcaacactgtacaaatatctcagaactttctaacacatctgaaaatgatgagcaaaatgctgaggatttggatgatagtgatcttcctaaaacatcttctggaagaaggagagtccatgatgggaaaaaaagcatcagagctacgaactatgttgaaagcaactggaagaaacagtgtaaggaactagtgaacttaatttttcagtgtgaagattctgaaccatttagacaacctgttgatttggttgaatatccagactacagagatattatagataccccaatggattttggaacagtaagggaaactctagatgcgggaaattatgacagccctttggagttttgcaaagacatccggctgatatttagcaatgcaaaagcgtatacaccaaacaaaagatcaaagatttatagtatgaccttgagattatctgccttatttgaagaaaaaatgaagaaaatctcttctgattttaaaattggtcaaaaattcaatgaaaaacttcgaagaagccagaggttcaagcaacggcaaaattgtaaaggtgacagtcagcctaacaaaagtatcagaaacctcaagccgaagaggttaaaatctcagacaaaaataattcctgagttggtaggttctcctacccagtctacctcaagtaggacagcttatcttggaacccacaagacaagtgctggtatctcttcaggtgttacttctggtgactcttcagattcagcagaatcatcagaaaggaggaaaagaaatagacctataacaaatggttctacattatctgaaagtgaagtggaagattctttagctacctctttgtcatcgtcagcttccagtagttctgaggaaagcaaagagagttccagagctcgtgaatcctcctcacgcagtgggctatccagaagcagcaatctcagggtaaccagaactagagctgctcaaagaaaaactggtcccgtttcattagcaaatggatgtggcagaaaagccactcgaaagagagtctatttaagtgattctgataacaattcattggagactggtgaaattctaaaagccagagctggaaataaccgaaaagtcttaaggaagtgtgctgctgtggctgccaataaaataaagctaatgagtgatgtagaagagaattctagctctgaaagtgtctgttctggtcggaagctgcctcaccgcaatgcttctgctgtagctagaaaaaagttattacataattctgaagatgaacagagcttaaagtcagaaattgaagaagaggagctaaaagatgaaaatcaacyattaccagtgtccagttctcacactgcccagagcaatgttgatgaatctgaaaacagagactcagagtcagaaagtgatttgcgggtagcccggaaaaattggcatgctaatggttacaagtcccatactccagcaccttcaaagacaaaatttcttaaaatagagtcttctgaggaagactctaaaagtcatgattcagatcatgcatgtaacagaactgctggcccatcaacgtctgtgcagaaacttaaggcagagagcatctcagaggaagcagattctgaaccaggaagatctggtggtaggaaatacaatacatttcacaagaatgcgagtttctttaaaaaaaccaagattctgagtgactcagaagactctgaatctgaagagcaagatagagaagatgggaaatgtcataaaatggaaatgaacccaatttcaggaaatctgaactgtgaccctattgctatgtcccagtgttcctcagatcatggatgtgaaactgatttagattcagatgatgacaaaatagaaaaaccaaacaattttatgaaagattctgcatcacaagacaatggactaagcagaaaaatttccaggaaaagggtctgttccagtgactcagacagtagtttacaggtggttaagaaatcatcaaaagccagaacaggtctcctgaggattactcgaagatgtgcagctacggctgccaataagatcaagctcatgagtgatgtagaagatgtcagtttagaaaatgtgcacactagaagcaaaaatggaaggaaaaaacctctccatcttgcttgtactacagctaagaagaaattgagtgattgtgaaggaagtgtacattgtgaagtaccaagtgaacagtatgcctgtgaaggcaagccacctgatcctgactccgaaggtagtacaaaagtgcttagtcaggctctaaatggagactcagactctgaagatatgttgaattcagaacacaagcacaggcataccaatattcacaaaatagatgcaccttctaaaagaaaaagttcctctgttacatcttcaggagaagattcaaaaagtcatattccagggagtgagactgataggacattttcttcagagtcaaccttggcacaaaaagctactgcagagaataattttgaagtggaactgaattatgggctgcgcaggtggaatggcagaagactcaggacctatggaaaggctccttttagtaagacaaaagtgattcatgattcacaggaaacagcagagaaggaagtaaaaaggaagagatcgcatcctgaattggaaaatgtgaaaatctctgaaacaactgggaattcaaagtttagacctgatactagttccaaatcatcagatttgggatctgtaactgaatcagatattgactgtactgataatacaaaaaccaaaaggaggaaaacgaaaggaaaagcaaaagtagttagaaaaggtaaaacttttacagctaacatatctaaaactgtgagacgtcaaagacaaagcaaacgccctaggttaagtgtggatgataatgactgggaggatttggactatgcaaaatctaaaagagttcttcgacgttcaaaaataaaaacgagaaatcagggtagaaggactgtgagataccatgatggggatgatgacagaagtttagaaaatgtgttagatttcaatggttgcaccttatgaccttgagggaaagccagttcatttaagaggaaatggactggcatttatggtgaaagctggctgttaaaattatttttttgtcttacaattcagggaatatatttatatttttctatgaaaagttatgaatgtgactaaatcatgactgttatttttatttgcacttgctggtctttgtagcagcattcagcacaggtgccaaaatatgcttcattttgggggcagatctattttgacagtatttgactacatatagcaagagtttgaaatatgttaaacactagacatcctggttatcaaaaccaatgagcattactttcatggcagcaagtgtcatgcagttattttctgaatttgtcaaagaggcagtagtttctaacccctgttctatagtagttacaacaatttcacaacctatgtttacagattcttcataaatacatgcatactgacactataatcatgggaggtgtaaccatgattagtaggcgaggtacctaccactttttttttttcttcccctggctacttgagtagaatgcattataccagatctggtcactttcattgaaatggtttctaattttcttcccaagtgctgttgggtttttttcttcttaaggaaaacgttgtcacttttatgttataaacttgaatttataaagtgctggtaaattatttttaatgatttgagtgcatgttttaaacctctaggaccagagcatagtcagagcattttcttttaaattgtgcactaacaaaatgctatataatctgtcttctgtccaagatctcctggtttccattgtaagggatttaaccaaaatcttgctcttccataatcttactctgtgaaatagaggaattcgtgtgccttagatttagaagtgtgttctttaatagagtgtacagggctaaaagagtatttaagttaatatgtaggtttcccccatctgtattccaattgtagaggtgagttttgttaagagtacaattgcaaatcttatctatataggaaaatagctaaatgtcattctccatctctttgttttagtttactgcttccatgtgcaatcctaagcattctttgctggggcaactaaatgtatctttattagtgacttctagtccaaatataagaaactgtcatgttttgtgggaaaataattttataatccatttaaagtgaaagtttatcacacaaatagtacacttattttctaaccaaatacttgataggttatgctactccagtgtagatggccattcctaacttgtttgtgcctgaagatggacttgattcaaatggtttacatatttagtgggtaagggatatgttacagtaccccacctgtaagttatttattagccctaattgtgtttgatttcagacaaaattaacccttttctcctgtgtatctttgaagtggcagataaggtgaagcatcagactggtatcaatattagacaatgttatttattagccctaattgtgtttggtttcagacaaaaccttttctcctgtgtatctttgaagtggcagacaaggcgaacatcagactggtattaatgttagagaatgttctgaagtgttcctattttgtagttatctattccatttgacatagtagaaggtacattttctttctactctgatgcatggggaaggatgtttttggacattatcaactgagataggtgggaaacctcctctcatttgtggcttagagagctatcaccatttcagaactatgatgcttttcttctcagaacttgtgttaagtagatagtaaacagattgattcatgataattgtccttgactaagactgaaaagactaatgggatgccttttactttgctaattttaaaaactggtgatagatgtcaaatccattaatttatttaaactcttcttaaccttctcttttataatctgttctcaggttttaactccatgtttaccatcatttgcaaaaaggtaccaaaaaaatccataaataaatatggaatacattcataagtacatacattcttttggtataaaacaatattttgacagtttaggcttcattaatagaactattctgattatttggactgcattaattggtcattgactggccatccaattaccattttttctttcagtccaaaatagttagacccttgcatacagaagtggtattttggtttttaatcagatttggtttcatcagaagcagcaagaatggacctgatgtctttaaaagcatagccgacaatggtagcttctcaagttatgaaataaaactgagagataatggagaaaataatttttatgggtttttttggttatggtgctattcctaaggttaactttgaatatgtgacacacacactcctaagtacctttaagtccaaaatagttagacccttgcatacagaagtggtattttggtttttaatcagatttggtttcatcagaagcagcaagaatggacctgatgtctttaaaagcatagccgacaatggtagcttct

SEQ ID NO: 28 - DNA, 2501 bp, Homo sapien
ggtccaggcggcgcgcacggtatggcggcggcggcggcggcggcggcggcgcgcgcctgagaagaggggacgccagcccggtcaggcctcggcgcggcctacacgctccgctcgctcgctcgctcccgcctcccgccccgcgcccggccatggcggagccgtcgtccgcccgacgcccggtgcctctcatcgagtcggagctgtacttccttatcgcccggtacctatcggcgggcccgtgtcggagagcggcccaggtgctggtgcaggagctggagcagtaccagttgttgccgaagagattggactgggagggcaacgagcacaacaggagctacgaggagttggtcttgtccaataagcatgtggctcctgatcatcttttgcaaatctgccagcgcatcggtcctatgttggataaagaaattccacccagtatttcaagagtcacttctttacttggtgcaggaaggcagtctttgctacgtacagcaaaaggtaccttaatttgaagaagtgttctgctttgtattaatagcctaataattattataattgtgaagtaatgtaagcattgtggaagaaaggtgataatgtaactataaatcatgctgtggactataaaattctctgcatttagcatagaacattgaattttattacataagtgtttaatgggtccttctgcattaaaaagttgataaagatatagatgttaagctaaaaagcttgaatttattctgagatgttgtttgaggttttatcaatgtgagttcttaattttccattttgtagctcactcataacttcattgaatgtaattgtatgtgtctaataaactctttaaatgctagaggtatttcatttgatatttagcttctgaaagccctttgttataaagggaagtgattttctaaatttggtagcagcttgaaaacaagcaccacaaatgtaaaattgcatggttctttttttactaatttaatttttttgccaagttatgtgctagcaaaatgtttgaaattgctattctttttctgttagcttggtatatatgacttagactaagtatatgtatgtgatataatatatgtgtacatgtggctaaactgctaatgggcaaagattgttggttcttctgatgctgagtatacatcaagttcatcccatgattattttttattacgagctattgctgatgtgatgctactcttagctgcaccaccagtataaagcttaactgagaaagaacacccctccctcttagttccgtgccagactggtttgttagctttagttgtttcttagtgctctagccatgtcaccctgtggcactaatcaggacactgtttatattcttcctcttctgtgtccctattcactttgtaattattctattttagctggttatatggtagttaattggtagcctgttttcctttgttttctttacttgtgtcaagctccatgtcgttgttttgtgatgagcagtgatttagaactggccagaccttagaagagtcttcagcaagctgccctagggtaggggcatattctctgtttgttttgtactggtaccccaggaggatgccttgtaactgctctttggtcatgatagtggtaatgaatccattcatgtaaaatgcaatatgtctgttagtttggggcacccgaggctcagtagaggtttagtatgatgccttccctttcttctttgagttatgaagaaactaatttctggcacagtgtgactgcttcaaacctatgttctgctgctatctcctatagaggagggcagacttttttttcttagtgcatttgctggtaggtcaaggagggatggactttgaattagtgttcagagtcacagatcctacgtatgtgctcttcagtagaggattttctgtgatcctacaatgaagggaaagctatataatttattggtacttcctaaagatagagactaaagtcatggtagtattggccaaattaattttaaaactgaacaagtcatgaattttcatataaatcaaagaactttttccttataaaagcttccatttttgaaaagttggatcagttgtaagacctttcatctttagtattgtatgatataattctacattgaaaaataaacacttggcattaaatgggacttggagtcaaaagatctggttttatggtccatctttaccaatcatttgctgtggatctctttaaaggtcctggaacctttgagcctcagttacctcacttgtaaattggcaaaaatacctacctcacagggttgttgtgaggattcaatgagctaatgtatgttgaaagcactttgtgaattgtaaagtgctacacaaatgttagttgttgttgctgctgtatctgagatgtcttaattttctttttcttcagaaatagtctaataaacctccagggcttttctgttaaagtatactagttggtaaaatgttgaataaacagtttattacaatataaaaaaaaat

SEQ ID NO: 29 - DNA, 2445 bp, Homo sapien
ggtccaggcggcgcgcacggtatggcggcggcggcggcggcggcggcggcgcgcgcctgagaagaggggacgccagcccggtcaggcctcggcgcggcctacacgctccgctcgctcgctcgctcccgcctcccgccccgcgcccggccatggcggagccgtcgtccgcccgacgcccggtgcctctcatcgagtcggagctgtacttccttatcgcccggtacctatcggcgggcccgtgtcggagagcggcccaggtgctggtgcaggagctggagcagtaccagttgttgccgaagagattggactgggagggcaacgagcacaacaggagctacgaggagttggtcttgtccaataagcatgtggctcctgatcatcttttgcaaatctgccagcgcatcggtcctatgttggataaagaaattccacccagtatttcaagagtcacttctttacttggtgcaggaaggcagtctttgctacgtacagcaaaaggtaccttaatttgaagaagtgttctgctttgtattaatagcctaataattattataattgtgaagtaatgtaagcattgtggaagaaaggtgataatgtaactataaatcatgctgtggactataaaattctctgcatttagcatagaacattgaattttattacataagtgtttaatgggtccttctgcattaaaaagttgataaagatatagatgttaagctaaaaagcttgaatttattctgagatgttgtttgaggttttatcaatgtgagttcttaattttccattttgtagctcactcataacttcattgaatgtaattgtatgtgtctaataaactctttaaatgctagaggtatttcatttgatatttagcttctgaaagccctttgttataaagggaagtgattttctaaatttggtagcagcttgaaaacaagcaccacaaatgtaaaattgcatggttctttttttactaatttaatttttttgccaagttatgtgctagcaaaatgtttgaaattgctattctttttctgttagcttggtatatatgacttagactaagtatatgtatgtgatataatatatgtgtacatgtggctaaactgctaatgggcaaagattgttggttcttctgatgctgagtatacatcaagttcatcccatgattattttttattacgagctattgctgatgtgatgctactcttagctgcaccaccagtataaagcttaactgagaaagaacacccctccctcttagttccgtgccagactggtttgttagctttagttgtttcttagtgctctagccatgtcaccctgtggcactaatcaggacactgtttatattcttcctcttctgtgtccctattcactttgtaattattctattttagctggttatatggtagttaattggtagcctgttttcctttgttttctttacttgtgtcaagctccatgtcgttgttttgtgatgagcagtgatttagaactggccagaccttagaagagtcttcagcaagctgccctagggtaggggcatattctctgtttgttttgtactggtaccccaggaggatgccttgtaactgctctttggtcatgatagtggtaatgaatccattcatgtaaaatgcaatatgtctgttagtttggggcacccgaggctcagtagaggtttagtatgatgccttccctttcttctttgagttatgaagaaactaatttctggcacagtgtgactgcttcaaacctatgttctgctgctatctcctatagaggagggcagacttttttttcttagtgcatttgctggtaggtcaaggagggatggactttgaattagtgttcagagtcacagatcctacgtatgtgctcttcagtagaggattttctgtgatcctacaatgaagggaaagctatataatttattggtacttcctaaagatagagactaaagtcatggtagtattggccaaattaattttaaaactgaacaagtcatgaattttcatataaatcaaagaactttttccttataaaagcttccatttttgaaaagttggatcagttgtaagacctttcatctttagtattgtatgatataattctacattgaaaaataaacacttggcattaaatgggacttggagtcaaaagatctggttttatggtccatctttaccaatcatttgctgtggatctctttaaaggtcctggaacctttgagcctcagttacctcacttgtaaattggcaaaaatacctacctcacagggttgttgtgaggattcaatgagctaatgtatgttgaaagcactttgtgaattgtaaagtgctacacaaatgttagttgttgttgctgctgtatctgagatgtcttaattttctttttcttcagaaatagtctaataaacctccagggcttttctgttaa

SEQ ID NO: 30 - DNA, 3174 bp, Homo sapien
caaaatagacggggacatgttacagtaggttagaagatcaacagtgctatggaggaaaagaacacaggaagagtaaaagagaaatgggcacagagtgaggataagtttaaattgtacttagggtggttagggaaggtctcactgaaaatgtgacatttgagccaagacttgaaggaggggagggactcagccatgcagtttttccaggagaagagcattcctgcagaacaaacagcaagtacaaataccctgaggcagccgtgggccaggtcacgccacagtgaggctggagcactatgagaaggggagcagtcaggtgagaggtaagacaaaccagagagaggccagatcgtgtggacttggccttttcctctgggtctgatgggagcctctggaggattttgagagaggaaggacaagtccgtctttagtttgtttttttttttttcttgagatggagtttcgctctcgttgcccaggctggagtacaatggctcgatctcggctcactgcaacctccacctcctgggttcaggcaattctcctgcctcagcctcctgagtagctgggattacaagcacacgccaccatacccggctaatttttgtatttttagtagagacagggtttcactgtgttggtcaggctggtctcaaactcctgacctcaggtaatccacctgccccggcctcccaaagtgctgggattacaggcatgagccactacgcctggccctgtcttaagttttaacaggatccctccagctgcctgagaatacacagaaataggatgaaggtagaagcagtaagacataagaggttgtggtgctcttccggatgagaagtgcttagattctggatacattttgaagagctgtacttccttatcgcccggtacctatcggcgggcccgtgtcggagagcggcccaggtgctggtgcaggagctggagcagtaccagttgttgccgaagagattggactgggagggcaacgagcacaacaggagctacgaggagttggtcttgtccaataagcatgtggctcctgatcatcttttgcaaatctgccagcgcatcggtcctatgttggataaagaaattccacccagtatttcaagagtcacttctttacttggtgcaggaaggcagtctttgctacgtacagcaaaaggtaccttaatttgaagaagtgttctgctttgtattaatagcctaataattattataattgtgaagtaatgtaagcattgtggaagaaaggtgataatgtaactataaatcatgctgtggactataaaattctctgcatttagcatagaacattgaattttattacataagtgtttaatgggtccttctgcattaaaaagttgataaagatatagatgttaagctaaaaagcttgaatttattctgagatgttgtttgaggttttatcaatgtgagttcttaattttccattttgtagctcactcataacttcattgaatgtaattgtatgtgtctaataaactctttaaatgctagaggtatttcatttgatatttagcttctgaaagccctttgttataaagggaagtgattttctaaatttggtagcagcttgaaaacaagcaccacaaatgtaaaattgcatggttctttttttactaatttaatttttttgccaagttatgtgctagcaaaatgtttgaaattgctattctttttctgttagcttggtatatatgacttagactaagtatatgtatgtgatataatatatgtgtacatgtggctaaactgctaatgggcaaagattgttggttcttctgatgctgagtatacatcaagttcatcccatgattattttttattacgagctattgctgatgtgatgctactcttagctgcaccaccagtataaagcttaactgagaaagaacacccctccctcttagttccgtgccagactggtttgttagctttagttgtttcttagtgctctagccatgtcaccctgtggcactaatcaggacactgtttatattcttcctcttctgtgtccctattcactttgtaattattctattttagctggttatatggtagttaattggtagcctgttttcctttgttttctttacttgtgtcaagctccatgtcgttgttttgtgatgagcagtgatttagaactggccagaccttagaagagtcttcagcaagctgccctagggtaggggcatattctctgtttgttttgtactggtaccccaggaggatgccttgtaactgctctttggtcatgatagtggtaatgaatccattcatgtaaaatgcaatatgtctgttagtttggggcacccgaggctcagtagaggtttagtatgatgccttccctttcttctttgagttatgaagaaactaatttctggcacagtgtgactgcttcaaacctatgttctgctgctatctcctatagaggagggcagacttttttttcttagtgcatttgctggtaggtcaaggagggatggactttgaattagtgttcagagtcacagatcctacgtatgtgctcttcagtagaggattttctgtgatcctacaatgaagggaaagctatataatttattggtacttcctaaagatagagactaaagtcatggtagtattggccaaattaattttaaaactgaacaagtcatgaattttcatataaatcaaagaactttttccttataaaagcttccatttttgaaaagttggatcagttgtaagacctttcatctttagtattgtatgatataattctacattgaaaaataaacacttggcattaaatgggacttggagtcaaaagatctggttttatggtccatctttaccaatcatttgctgtggatctctttaaaggtcctggaacctttgagcctcagttacctcacttgtaaattggcaaaaatacctacctcacagggttgttgtgaggattcaatgagctaatgtatgttgaaagcactttgtgaattgtaaagtgctacacaaatgttagttgttgttgctgctgtatctgagatgtcttaattttctttttcttcagaaatagtctaataaacctccagggcttttctgttaaagtatactagttggtaaaatgttgaataaacagtttattacaatataaaaaaaaat

SEQ ID NO: 31 - DNA, 6330 bp, Homo sapien
gctacacatagatgctcacactctataggctgcctgatcatggaaccagcatggggccctgattatgatctccacggggctgtcagtggttagggaaagctctttaagacccagcgatcatggttgatgccactgccatctccaattttaaaaatgccaatgaaaattttataatgcttctgtagtaaccatatgcagtttactttgaatttaggaaaacagttttgtatgatgaaatattgtgcagaatctgtaaataaggtagcttaaaaaaaaaaaaaaagtctaattagaatatgattaatccttaaaatgtagaaactagagattgtgttgagtcagaactgttatgtttgtatccaggtttctattcaccacatataccatcttagaatacacacatatctgtgagttataatttaaagtggtcatccagggaaatgatcatggagtgctactacagatgtacagttttacactactgatgtgttcttgccatacccaagtagggaatcacttccaggaaaacaagtcctcaagcactcaatgactttgtaaacccatgactgaaacaagactcatctgaggcagtaggactggtgggattctactgacttcttagtatcacatggcaccatcacaaatgcattgttagagcagcaacatccagagttcttaagcttgtaccctaacacacaaatttgacttctaaccctgaaatatcctatatatatttctaaaactgtttgtagttttcttgagaaaaagcactttataatttactcagttttcagtaataaaattaacactgacttgaatgtatttaaaaaaattctccacagttttgtcttcctcagattgtttttatccttattctctgaaattcctgttttattgtctaagacttaagagattcagctttatcaagttagagtacagtgtaattcaaattctccctcccttgggcatagttactgaagttcaaatttccttaagtattttttaaaaacctgattttagttttttttttcctgcagaatcttaacttttccattattctggatgacaaataaacatttattaaaatgtgttagaattagtatttactaggttcctaaattgtcagtataggtactttgatcacacatcaaaatggaatttctgcaacttaaagcattttgttacaaattgtagttgaaatagaattttatctatttgtctggatgaataggttgttgggaatgaaccagttatctgttcttttcttccaaatgcaaatggtgcagctagttgataatagtatattctcatcctactataaagtgcaaatttcaccttaattttgcatattttaaaatttttgtttaccctttgtagcatatttacattttagcatttgctaacattgatttaatgtgttaaagattcattttggatatagggttgacttgttggagatactagttcataattttaaaattcccaagagaagtgtctttgaagtggtaaacacagtgcactttaagccacttctcttcccacagagtccagctgaaggaggtaagggcatgctgcatgagagtaatgccgtgatgagtgtcttactctggtaaaatgccatttacaatgcctggagactgaacactgaacaaaacatagtgcccttagaatttcactggaaaaacatgtgaatcacataagttagttggcaaaaggaactgatgtgtatgtggtggggttgctttgaataaagtatttcctaacctattctggggagaacgctcaactgatcttagagaagtgtgaaatcagtttcatagacttagggaaaaatctgaagtgcttgcactgtgagggcagaggcctgcctcattagtctagctgtatgaacatgtcagtccacagaagcagtttttacctgtactcatctgcccttcagtcagctttgtgacagaagggcaaacatcttcacagaagaaaaagttcagaaggttggcattggtggtttcattgctacagaataatagtgttacttgatagtatctgactaaaagagctctcattttctagtacttagtagtaaaaagaatgtggtggagtcctccagatgtctagtgtgggtggaggatatcaactggttatttcagtgatctacagccttaccttttgaatgctaaatgtctggaaacttcaggcagggtcctacaaaacaaactgccatcaagattggtgtgtaccatgaaggcagttttagatagtttgactgttcatggctgcaagaaagacctaaaattcaagggcccgtgaacttcagatacgtaaaaggaatatcacttctgttctagaagagtactaattagacttgtttgtgaaatttgaaaatttggctttgagacactggtaacaaacatatctgagccctcctaagtttggtcagcacggagtagtagctctggcatcatgtggctgtgtagagctccagtgtgatttcaagccccctctaaaaactgccttagtctgcatgaagtagttaactctccaaagtgctttttgtctggcaaatcccttcacaattttcacctctcgtctaaaagcttccttaaaggaagccttccttgatcccttaggctaggttaggtttccagtctgtgttctcatagcactctgcactttttggttccttaaagcaactctgtgttattttttagaattttaatctgaatctcgtgtgtcacatacctaggtcagaaaatactggaacaatgaagttaagatttagtaattcaaattatgtaaaatgctcatatatatgtttttagattagcagctttatgatgccgatgctgaaggaacttttcaccccattcttacaagtctgctactgttttaagtgacatccttatagttgtagataagcaaatgtaaggttatatcaatgtgaagaagcccttagtatcacattttaaaatttatcatttagcaatatgacttttaaatttattgtttccgaatgagtgttgttgaggaatgttagcagtagtaaaatcttgtgttacaagatttttgcatttacatgaactttcactcatttttcagaatttgttcctagagacagagaacccaatacaaaagtgagaacatgtatgcataatcagaaggatgcagtgcagatgcctagtgaaactctgaaagcaaaaatggtacctgagaaagttccccgcagatgtgctactgttgctgcaaataaaataaagataatgagtaatctaaaagaaacgatctcaggaccagaaaatgtctggattaggaagagtagcagaaaactgccccatcgaaatgcttctgctgcggctaagaaaaaattactgaatgtttataaagaggatgatacaaccataaattctgaaagtgaaaaagagctagaagatattaatagaaaaatgctttttttaagggggttcagatcctggaaagaaaatgcacaatagtgactatgagaatgtagaagtggcatctgaaaacaattggtacacaagtaaactggcagttacattctgctcccagctctaaaattactcccttattggcatctttggaggaattttctaaaagccataatccagtgggttcctcccagtcagctcttgtacagacatgtgctctggggaattctgaggaggaaataaattgcagagtctgtaggtggagaggtggaaagaaaagacaaatggcctgctataagactactattcctttccagaatgcaaggccttgaagacatgattccttagaggaagaatataatgggaagtgtacaggctaggaagaacttgaagtgaacaaatttcaaaatcttaacctgatgctaattttcagggttctccattacagtgtaaaaattcagaccacgacaactatggtgtcatgaggaaaaaaaatcaggcatttttccaaaggaagtgctaatgggcctatttgacttctgagtgaagcaaaaactacccagatccattccctacaattcacatccccaaaggtcaaaaacaaactaggaggacctgggaatttcagctggagatactgattattgagttctgaagtagagtgttggaaataggcaattagagaaagtccattgatgtcattttgtttataatattgcagttcatactgaatgaccacttgatatgactaattcagggaatatatatttttctatgaaagctatgaatgttactatcacggcttttccttatttttacttgtatgtagcagcatttacagaaatgccaaaaatgtgcctcattaagaggcaggtcttaatcagttagataaaaataaaatgtatagcttaagatcaaaacagtcatatttttagatacagtgaaatcttttatgtttctctacagcaccttaaaaattagaacttgaatactttgagtaaacttactacaatctcatcccaacaaactttaatggtagcatgtttggcctatttcattgtggcctgtactaggattagaaaatttggtcgtggtataacaaagaagtgtatttacaataggatttaatttgttgttaatatgtatttgttgaaattaaaattgccagattaaatgaatatactgtcgcatctttttaacatagtaacgtgttactggaaaaattaagttgttgaaagtaagttgttttcccatttaaaaatatctgaatatatgatttgcatgtgtaaatctgaaaaactaaactacagaaacctagggttttctatttcttttttaagtcaaatgcatttttttttttgttatacagatgaaccaagtgtctaaaatacttgagaaatttgtggttgcatgtctgttttaaaaaaaaggctttttgttttttagcataagccagaatattctaacctactaagtctgtgtcctttgctccttttgtagtatactttcatctaaattactgatcccaatatgttgatacacaggtgagaaggaagaattcctaataaactgctattacttttaggtgcatggggtttgatttttgagctctaatgaaatgcttaaacttctttccagttcaaattttacacttaatttataatatttattgagtatattatgtcctcaacaagtaactataaaatgaaatacttaactcggtgaagactattttatgcaaagtttttttttttttttttttttttttttagcaatttcagtgtaatgaaagaatttaagctttgaatttataatttgctgtggtggggttaatttctgtcagtatttgagattgtattatcagtcttgcataatgaaatccttttttggctaagtatttaattcgaacatatttgcctttttaaaaagtgcttggcctaaacttattgtaactgcatgaaataagcatttgcttaaaacttaacattgtaaaattgttctctctgaaatgtgtgcagaatttaaatcatggccaaatgtattactattaccctatttacagtaatttgctttgcagaaaatatttcttcatcatggaactgtgaaatcaaattgaagatcttactggtaaaaatgacaaattaacaaaaggactaagacaagtggtgcccaaacaacctttttattctgcagttccatcatcataatagaccagttaacccaggagtcctaatgttttaaaacatcattgtggtgatcttgtttattctatctcactaaggatatccagtttcctaagctcttactggctagcaatttcgtcttaattttattgctaaatgttcaaattttgcttccaaactcactttatttttgcagatgtgtacatctgctaaatactaattttatgtaaatgattttgttgattatctttccacatcttaaaatgtttctaacagctttgagattttatctcaacaggctctctctgaccccaaagtagtacttaccttcgtgactactgacaaagtcacaaaatgcaggcgatgtcatgtatttcggtacaactaaatctaggaaacggttttttcattgcattactgcatattttcattttcatttaaattatgtcccctttttctcttgcttgaaacagtgctcctcgaactttgtcttccagcacattttaaagagaaccaattaaagaacaatcacacattctgcttattaaaggctatttaaaaagaaacattttgtattagaaaatggccaactttaaaacactattttttacactcataaaaatgttttttaaatcgccttgacaatcatcagcttttgaaatgtgaattcctattgccagagtaaaggtctcgtttttatacca

SEQ ID NO: 32 - DNA, 2154 bp, Homo sapien
ggtccaggcggcgcgcacggtatggcggcggcggcggcggcggcggcggcgcgcgcctgagaagaggggacgccagcccggtcaggcctcggcgcggcctacacgctccgctcgctcgctcgctcccgcctcccgccccgcgcccggccatggcggagccgtcgtccgcccgacgcccggtgcctctcatcgagtcggagctgtacttccttatcgcccggtacctatcggcgggcccgtgtcggagagcggcccaggtgctggtgcaggagctggagcagtaccagttgttgccgaagagattggactgggagggcaacgagcacaacaggagctacgaggagttggtcttgtccaataagcatgtggctcctgatcatcttttgcaaatctgccagcgcatcggtcctatgttggataaagaaattccacccagtatttcaagagtcacttctttacttggtgcaggaaggcagtctttgctacgtacagcaaaaggtaccttaatttgaagaagtgttctgctttgtattaatagcctaataattattataattgtgaagtaatgtaagcattgtggaagaaaggtgataatgtaactataaatcatgctgtggactataaaattctctgcatttagcatagaacattgaattttattacataagtgtttaatgggtccttctgcattaaaaagttgataaagatatagatgttaagctaaaaagcttgaatttattctgagatgttgtttgaggttttatcaatgtgagttcttaattttccattttgtagctcactcataacttcattgaatgtaattgtatgtgtctaataaactctttaaatgctagaggtatttcatttgatatttagcttctgaaagccctttgttataaagggaagtgattttctaaatttggtagcagcttgaaaacaagcaccacaaatgtaaaattgcatggttctttttttactaatttaatttttttgccaagttatgtgctagcaaaatgtttgaaattgctattctttttctgttagcttggtatatatgacttagactaagtatatgtatgtgatataatatatgtgtacatgtggctaaactgctaatgggcaaagattgttggttcttctgatgctgagtatacatcaagttcatcccatgattattttttattacgagctattgctgatgtgatgctactcttagctgcaccaccagtataaagcttaactgagaaagaacacccctccctcttagttccgtgccagactggtttgttagctttagttgtttcttagtgctctagccatgtcaccctgtggcactaatcaggacactgtttatattcttcctcttctgtgtccctattcactttgtaattattctattttagctggttatatggtagttaattggtagcctgttttcctttgttttctttacttgtgtcaagctccatgtcgttgttttgtgatgagcagtgatttagaactggccagaccttagaagagtcttcagcaagctgccctagggtaggggcatattctctgtttgttttgtactggtaccccaggaggatgccttgtaactgctctttggtcatgatagtggtaatgaatccattcatgtaaaatgcaatatgtctgttagtttggggcacccgaggctcagtagaggtttagtatgatgccttccctttcttctttgagttatgaagaaactaatttctggcacagtgtgactgcttcaaacctatgttctgctgctatctcctatagaggagggcagacttttttttcttagtgcatttgctggtaggtcaaggagggatggactttgaattagtgttcagagtcacagatcctacgtatgtgctcttcagtagaggattttctgtgatcctacaatgaagggaaagctatataatttattggtacttcctaaagatagagactaaagtcatggtagtattggccaaattaattttaaaactgaacaagtcatgaattttcatataaatcaaagaactttttccttataaaagcttccatttttgaaaagttggatcagttgtaagacctttcatctttagtattgtatgatataattctacattgaaaaataaacacttggcattaaatggg

SEQ ID NO: 33 - DNA, 7268 bp, Homo sapien
ggtccaggcggcgcgcacggtatggcggcggcggcggcggcggcggcggcgcgcgcctgagaagaggggacgccagcccggtcaggcctcggcgcggcctacacgctccgctcgctcgctcgctcccgcctcccgccccgcgcccggccatggcggagccgtcgtccgcccgacgcccggtgcctctcatcgagtcggagctgtacttccttatcgcccggtacctatcggcgggcccgtgtcggagagcggcccaggtgctggtgcaggagctggagcagtaccagttgttgccgaagagattggactgggagggcaacgagcacaacaggagctacgaggagttggtcttgtccaataagcatgtggctcctgatcatcttttgcaaatctgccagcgcatcggtcctatgttggataaagaaattccacccagtatttcaagagtcacttctttacttggtgcaggaaggcagtctttgctacgtacagcaaaagactgcaggcacacagtttggaagggctctgcctttgctgctcttcatagaggaagacctcctgaaatgccagtgaattatggttccccaccaaatcttgtggagatacatcgaggaaaacaactcacagggtgttccacttttagtacagcatttccaggaactatgtatcagcatataaaaatgcacagaaggattctcggacatctatctgctgtttactgtgtagcatttgataggacaggacatagaatctttacaggttcagatgactgtttggtaaagatttggtcaacacataatggccgcttgttatctacattaagaggtcattctgcagaaatttcagatatggcagtaaactatgagaatacaatgattgctgcggggagctgtgataaaattattagagtgtggtgcttgagaacttgtgccccagttgctgtgctccaaggacacacaggatcaattacatctttacagtttagcccgatggccaaaggctctcaaagatacatggtttccactggtgctgatgggacagtttgcttttggcaatgggatttagaatccttaaaatttagcccacgtcccctgaagttcactgaaaagcctaggccaggcgttcaaatgctttgttcttcttttagtgttggtggtatgtttttagccacaggtagtactgatcatgtaatcagaatgtattttttgggttttgaagcacccgaaaaaatcgcagaacttgaaagccacactgataaagtagatagtatccaattttgtaacaatggtgatcggttcctaagtggtagcagagatggaacagcacggatttggagatttgagcagttagaatggaggagcattttattggatatggctaccagaatctcaggggacttatcttccgaagaggaaaggtttatgaaacctaaagtaacaatgatagcttggaatcaaaatgatagcattgttgtcacagctgtgaatgatcatgtcctcaaagtgtggaattcttacactggacaactgcttcataacttaatggtaggtaatttctggtacaatgtaacaaatgagattttttgaaatatgattgtaattttgaagctataaaaataatatattgaacaagttgtttctctcatgtaaactatgaaatgattagaaatttttataattataaattattgtcgaatacatttctaaaagtatatgctgtaacagtatgtatttttaaattttcaatttgtaacttgtaaaccctccttaatgttatgactttgttaaataaagggacatgctgatgaagtatttgttctggagacacatccctttgattccagaattatgttatctgcaggacatgatggcagcatatttatatgggatattacaaaaggtaccaagatgaaacattattttaatatgattgaaggacaaggacatggagctgtgtttgactgtaagttttcacaggatggacagcattttgcctgtacagattctcatgggcaccttctgatatttggttttggatgcagcaaaccatatgaaaagattcctgatcagatgttcttccatactgactatcgaccacttattagagattctaataattatgtcttagatgagcaaactcagcaggctcctcatcttatgcctccaccattcttggtagatgtagatggaaatcctcatccaaccaagtatcagagattagtaccaggccgagaaaattctgcagatgaacatttgattccacagctgggctatgtggcaacaagtgatggagaggtgattgaacaaattataagcctgcaaaccaatgataatgatgaacgcagcccagaatcgagtattcttgatggaatgataagacagttgcagcagcagcaagatcagagaatgggagcagatcaggatactattccaagaggactttcaaatggtgaagaaacaccccggagaggttttagaaggctgagcttagacattcagtcccctccaaatattggtctgcgtcgtagtggacaagttgaaggtgttcgtcagatgcatcaaaacgctccacgcagtcagattgctacagaacgtgacctgcaggcttggaaacgaagagtggttgtaccagaggtaccactaggcatatttaggaagctggaagacttccgattagagaaaggtgaagaggaaagaaatctttatataataggaagaaaaagaaagactcttcagctctcacataagtcggattcagtggttttggtatcacagtctagacaaaggacatgtaggcgtaaatatccaaattatggtagaagaaatcgtagctggcgtgagttatcttctggaaatgagtcttcaagctctgtaagacatgagacttcctgtgatcagagtgaaggttctggttcttcagaagaggatgaatggagaagtgacagaaaaagtgagagttacagcgaaagttcaagtgactcttcatctagatattccgattggacagctgatgcgggcatcaatttgcagcctcctttaagaacatcatgtcgtcgacgaattactcgattttgtagtagttcagaagatgaaatatctactgagaatttatctcctccaaaaagaagacgaaagagaaagaaagaaaataagcctaagaaggagaatttgcggaggatgactccagcagagcttgcaaatatggagcatttatatgaatttcaccctccagtttggattactgacaccacacttagaaaatctccttttgttcctcaaatgggtgatgaggtaatatattttcgacagggtcatgaagcttatattgaggctgtaagaagaaataatatttatgaactgaaccctaataaggagccatggagaaaaatggatcttaggtatcagagaagcagacactggggggaaggttgactatggcaaatccatttgatggatactccatccaggatcaagaattggttaaaatagttggaatacgatatgaagttgggccccctacactctgttgcctaaaactagcatttatagatccagcaactggaaaacttatggacaaatctttctctattagatatcatgatatgccagatgttattgactttcttgtattgcgtcaattttatgatgaagcaagacagaggaattggcagtcttgtgacagattccgctctattattgatgatgcttggtggtttggaacagtgttaagtcaagagccatatcaaccacagtatcctgatagtcatttccagtgttatattgttaggtgggataatactgaaattgaaaaacttagcccatgggacatggaaccaattcctgataatgttgatccacctgaagaattaggagctagtatttctgtcacaacagatgagctagagaaattgctctataaaccacaagctggtgaatggggtcagaaatcaagagatgaagaatgtgatagaattatcagtggtatagatcaacttttgaatcttgatatagcagcagcttttgcaggccctgttgatttgtgtacatacccgaagtactgtactgtagtagcttatccaaccgatctttacacaattcgaatgagacttgttaatcgattttacaggaggctgtctgcgttagtttgggaagtcagatatatagaacataatgccagaacatttaacgaacctgagagtgtaattgcaagatcagctaaaaagataactgaccaacttttaaaatttatcaagaatcaacactgtacaaatatctcagaactttctaacacatctgaaaatgatgagcaaaatgctgaggatttggatgatagtgatcttcctaaaacatcttctggaagaaggagagtccatgatgggaaaaaaagcatcagagctacgaactatgttgaaagcaactggaagaaacagtgtaaggaactagtgaacttaatttttcagtgtgaagattctgaaccatttagacaacctgttgatttggttgaatatccagactacagagatattatagataccccaatggattttggaacagtaagggaaactctagatgcgggaaattatgacagccctttggagttttgcaaagacatccggctgatatttagcaatgcaaaagcgtatacaccaaacaaaagatcaaagatttatagtatgaccttgagattatctgccttatttgaagaaaaaatgaagaaaatctcttctgattttaaaattggtcaaaaattcaatgaaaaacttcgaagaagccagaggttcaagcaacggcaaaattgtaaaggtgacagtcagcctaacaaaagtatcagaaacctcaagccgaagaggttaaaatctcagacaaaaataattcctgagttggtaggttctcctacccagtctacctcaagtaggacagcttatcttggaacccacaagacaagtgctggtatctcttcaggtgttacttctggtgactcttcagattcagcagaatcatcagaaaggaggaaaagaaatagacctataacaaatggttctacattatctgaaagtgaagtggaagattctttagctacctctttgtcatcgtcagcttccagtagttctgaggaaagcaaagagagttccagagctcgtgaatcctcctcacgcagtgggctatccagaagcagcaatctcagggtaaccagaactagagctgctcaaagaaaaactggtcccgtttcattagcaaatggatgtggcagaaaagccactcgaaagagagtctatttaagtgattctgataacaattcattggagactggtgaaattctaaaagccagagctggaaataaccgaaaagtcttaaggaagtgtgctgctgtggctgccaataaaataaagctaatgagtgatgtagaagagaattctagctctgaaagtgtctgttctggtcggaagctgcctcaccgcaatgcttctgctgtagctagaaaaaagttattacataattctgaagatgaacagagcttaaagtcagaaattgaagaagaggagctaaaagatgaaaatcaacyattaccagtgtccagttctcacactgcccagagcaatgttgatgaatctgaaaacagagactcagagtcagaaagtgatttgcgggtagcccggaaaaattggcatgctaatggttacaagtcccatactccagcaccttcaaagacaaaatttcttaaaatagagtcttctgaggaagactctaaaagtcatgattcagatcatgcatgtaacagaactgctggcccatcaacgtctgtgcagaaacttaaggcagagagcatctcagaggaagcagattctgaaccaggaagatctggtggtaggaaatacaatacatttcacaagaatgcgagtttctttaaaaaaaccaagattctgagtgactcagaagactctgaatctgaagagcaagatagagaagatgggaaatgtcataaaatggaaatgaacccaatttcaggaaatctgaactgtgaccctattgctatgtcccagtgttcctcagatcatggatgtgaaactgatttagattcagatgatgacaaaatagaaaaaccaaacaattttatgaaagattctgcatcacaagacaatggactaagcagaaaaatttccaggaaaagggtctgttccagtgactcagacagtagtttacaggtggttaagaaatcatcaaaagccagaacaggtctcctgaggattactcgaagatgtgcagctacggctgccaataagatcaagctcatgagtgatgtagaagatgtcagtttagaaaatgtgcacactagaagcaaaaatggaaggaaaaaacctctccatcttgcttgtactacagctaagaagaaattgagtgattgtgaaggaagtgtacattgtgaagtaccaagtgaacagtatgcctgtgaaggcaagccacctgatcctgactccgaaggtagtacaaaagtgcttagtcaggctctaaatggagactcagactctgaagatatgttgaattcagaacacaagcacaggcataccaatattcacaaaatagatgcaccttctaaaagaaaaagttcctctgttacatcttcaggagaagattcaaaaagtcatattccagggagtgagactgataggacattttcttcagagtcaaccttggcacaaaaagctactgcagagaataattttgaagtggaactgaattatgggctgcgcaggtggaatggcagaagactcaggacctatggaaaggctccttttagtaagacaaaagtgattcatgattcacaggaaacagcagagaaggaagtaaaaaggaagagatcgcatcctgaattggaaaatgtgaaaatctctgaaacaactgggaattcaaagtttagacctgatactagttccaaatcatcagatttgggatctgtaactgaatcagatattgactgtactgataatacaaaaaccaaaaggaggaaaacgaaaggaaaagcaaaagtagttagaaaagtgctcctcgaactttgtcttccagcacattttaaagagaaccaattaaagaacaatcacacattctgcttattaaaggctatttaaaaagaaacattttgtattagaaaatggccaactttaaaacactattttttacactcataaaaatgttttttaaatcgccttgacaatcatcagcttttgaaatgtgaattcctattgccagagtaaaggtctcgtttttatacca

SEQ ID NO: 34 - DNA, 4144 bp, Homo sapien
ggtccaggcggcgcgcacggtatggcggcggcggcggcggcggcggcggcgcgcgcctgagaagaggggacgccagcccggtcaggcctcggcgcggcctacacgctccgctcgctcgctcgctcccgcctcccgccccgcgcccggccatggcggagccgtcgtccgcccgacgcccggtgcctctcatcgagtcggagctgtacttccttatcgcccggtacctatcggcgggcccgtgtcggagagcggcccaggtgctggtgcaggagctggagcagtaccagttgttgccgaagagattggactgggagggcaacgagcacaacaggagctacgaggagttggtcttgtccaataagcatgtggctcctgatcatcttttgcaaatctgccagcgcatcggtcctatgttggataaagaaattccacccagtatttcaagagtcacttctttacttggtgcaggaaggcagtctttgctacgtacagcaaaagactgcaggcacacagtttggaagggctctgcctttgctgctcttcatagaggaagacctcctgaaatgccagtgaattatggttccccaccaaatcttgtggagatacatcgaggaaaacaactcacagggtgttccacttttagtacagcatttccaggaactatgtatcagcatataaaaatgcacagaaggattctcggacatctatctgctgtttactgtgtagcatttgataggacaggacatagaatctttacaggttcagatgactgtttggtaaagatttggtcaacacataatggccgcttgttatctacattaagaggtcattctgcagaaatttcagatatggcagtaaactatgagaatacaatgattgctgcggggagctgtgataaaattattagagtgtggtgcttgagaacttgtgccccagttgctgtgctccaaggacacacaggatcaattacatctttacagtttagcccgatggccaaaggctctcaaagatacatggtttccactggtgctgatgggacagtttgcttttggcaatgggatttagaatccttaaaatttagcccacgtcccctgaagttcactgaaaagcctaggccaggcgttcaaatgctttgttcttcttttagtgttggtggtatgtttttagccacaggtagtactgatcatgtaatcagaatgtattttttgggttttgaagcacccgaaaaaatcgcagaacttgaaagccacactgataaagtagatagtatccaattttgtaacaatggtgatcggttcctaagtggtagcagagatggaacagcacggatttggagatttgagcagttagaatggaggagcattttattggatatggctaccagaatctcaggggacttatcttccgaagaggaaaggtttatgaaacctaaagtaacaatgatagcttggaatcaaaatgatagcattgttgtcacagctgtgaatgatcatgtcctcaaagtgtggaattcttacactggacaactgcttcataacttaatggtaggtaatttctggtacaatgtaacaaatgagattttttgaaatatgattgtaattttgaagctataaaaataatatattgaacaagttgtttctctcatgtaaactatgaaatgattagaaatttttataattataaattattgtcgaatacatttctaaaagtatatgctgtaacagtatgtatttttaaattttcaatttgtaacttgtaaaccctccttaatgttatgactttgttaaataaagggacatgctgatgaagtatttgttctggagacacatccctttgattccagaattatgttatctgcaggacatgatggcagcatatttatatgggatattacaaaaggtaccaagatgaaacattattttaatatgattgaaggacaaggacatggagctgtgtttgactgtaagttttcacaggatggacagcattttgcctgtacagattctcatgggcaccttctgatatttggttttggatgcagcaaaccatatgaaaagattcctgatcagatgttcttccatactgactatcgaccacttattagagattctaataattatgtcttagatgagcaaactcagcaggctcctcatcttatgcctccaccattcttggtagatgtagatggaaatcctcatccaaccaagtatcagagattagtaccaggccgagaaaattctgcagatgaacatttgattccacagctgggctatgtggcaacaagtgatggagaggtgattgaacaaattataagcctgcaaaccaatgataatgatgaacgcagcccagaatcgagtattcttgatggaatgataagacagttgcagcagcagcaagatcagagaatgggagcagatcaggatactattccaagaggactttcaaatggtgaagaaacaccccggagaggttttagaaggctgagcttagacattcagtcccctccaaatattggtctgcgtcgtagtggacaagttgaaggtgttcgtcagatgcatcaaaacgctccacgcagtcagattgctacagaacgtgacctgcaggcttggaaacgaagagtggttgtaccagaggtaccactaggcatatttaggaagctggaagacttccgattagagaaaggtgaagaggaaagaaatctttatataataggaagaaaaagaaagactcttcagctctcacataagtcggattcagtggttttggtatcacagtctagacaaaggacatgtaggcgtaaatatccaaattatggtagaagaaatcgtagctggcgtgagttatcttctggaaatgagtcttcaagctctgtaagacatgagacttcctgtgatcagagtgaaggttctggttcttcagaagaggatgaatggagaagtgacagaaaaagtgagagttacagcgaaagttcaagtgactcttcatctagatattccgattggacagctgatgcgggcatcaatttgcagcctcctttaagaacatcatgtcgtcgacgaattactcgattttgtagtagttcagaagatgaaatatctactgagaatttatctcctccaaaaagaagacgaaagagaaagaaagaaaataagcctaagaaggagaatttgcggaggatgactccagcagagcttgcaaatatggagcatttatatgaatttcaccctccagtttggattactgacaccacacttagaaaatctccttttgttcctcaaatgggtgatgaggtaatatattttcgacagggtcatgaagcttatattgaggctgtaagaagaaataatatttatgaactgaaccctaataaggagccatggagaaaaatggatcttagggtaggatgatggcattattaaatcattaaacattttagcacatacatagttaaattacttacaaatctatttaaaaacctgttggaaacatattttattactttctttcctacttgataacatttctgctgtaaccaaaccttaagatcctgtgggaatggcttgtttgtcagtgggcaaaatttgtatgttgctgattggtgtgtaaaatgttaaatgcaacaacctagagtttcagaaaggcagcttggcaatatatatattatcactcttaaaaatgtttatgtatccaagacagattttcagaggaagaaatgcaagttttcaaaagaagaaataaaaactggaagaagggtttaacctcatggataataaaataaggaaataataatttttccttttcaatacttagccaattttgtgatttcgtttgtttttagctcaagaaagaattccacattttagcaagtggcaaagatgttggtttgttaacagttattcagattgctggtggggtgtgtgaagtggtccaggctttctaggggatattttgttaatagtagttgaaactgaaaaatatttggaacttttaattctgtgattttactcttctggtaatttggaaaacaagcagaaatgcttgtaaatatatgagtattgtagttcactcactgttgacagaaacaaagctggaaaaaaaaaattcagatattccacaatagtgaatgaaccaaatcatggtgcat

SEQ ID NO: 35 - DNA, 4483 bp, Homo sapien
ggtccaggcggcgcgcacggtatggcggcggcggcggcggcggcggcggcgcgcgcctgagaagaggggacgccagcccggtcaggcctcggcgcggcctacacgctccgctcgctcgctcgctcccgcctcccgccccgcgcccggccatggcggagccgtcgtccgcccgacgcccggtgcctctcatcgagtcggagctgtacttccttatcgcccggtacctatcggcgggcccgtgtcggagagcggcccaggtgctggtgcaggagctggagcagtaccagttgttgccgaagagattggactgggagggcaacgagcacaacaggagctacgaggagttggtcttgtccaataagcatgtggctcctgatcatcttttgcaaatctgccagcgcatcggtcctatgttggataaagaaattccacccagtatttcaagagtcacttctttacttggtgcaggaaggcagtctttgctacgtacagcaaaagactgcaggcacacagtttggaagggctctgcctttgctgctcttcatagaggaagacctcctgaaatgccagtgaattatggttccccaccaaatcttgtggagatacatcgaggaaaacaactcacagggtgttccacttttagtacagcatttccaggaactatgtatcagcatataaaaatgcacagaaggattctcggacatctatctgctgtttactgtgtagcatttgataggacaggacatagaatctttacaggttcagatgactgtttggtaaagatttggtcaacacataatggccgcttgttatctacattaagaggtcattctgcagaaatttcagatatggcagtaaactatgagaatacaatgattgctgcggggagctgtgataaaattattagagtgtggtgcttgagaacttgtgccccagttgctgtgctccaaggacacacaggatcaattacatctttacagtttagcccgatggccaaaggctctcaaagatacatggtttccactggtgctgatgggacagtttgcttttggcaatgggatttagaatccttaaaatttagcccacgtcccctgaagttcactgaaaagcctaggccaggcgttcaaatgctttgttcttcttttagtgttggtggtatgtttttagccacaggtagtactgatcatgtaatcagaatgtattttttgggttttgaagcacccgaaaaaatcgcagaacttgaaagccacactgataaagtagatagtatccaattttgtaacaatggtgatcggttcctaagtggtagcagagatggaacagcacggatttggagatttgagcagttagaatggaggagcattttattggatatggctaccagaatctcaggggacttatcttccgaagaggaaaggtttatgaaacctaaagtaacaatgatagcttggaatcaaaatgatagcattgttgtcacagctgtgaatgatcatgtcctcaaagtgtggaattcttacactggacaactgcttcataacttaatggtaggtaatttctggtacaatgtaacaaatgagattttttgaaatatgattgtaattttgaagctataaaaataatatattgaacaagttgtttctctcatgtaaactatgaaatgattagaaatttttataattataaattattgtcgaatacatttctaaaagtatatgctgtaacagtatgtatttttaaattttcaatttgtaacttgtaaaccctccttaatgttatgactttgttaaataaagggacatgctgatgaagtatttgttctggagacacatccctttgattccagaattatgttatctgcaggacatgatggcagcatatttatatgggatattacaaaaggtaccaagatgaaacattattttaatatgattgaaggacaaggacatggagctgtgtttgactgtaagttttcacaggatggacagcattttgcctgtacagattctcatgggcaccttctgatatttggttttggatgcagcaaaccatatgaaaagattcctgatcagatgttcttccatactgactatcgaccacttattagagattctaataattatgtcttagatgagcaaactcagcaggctcctcatcttatgcctccaccattcttggtagatgtagatggaaatcctcatccaaccaagtatcagagattagtaccaggccgagaaaattctgcagatgaacatttgattccacagctgggctatgtggcaacaagtgatggagaggtgattgaacaaattataagcctgcaaaccaatgataatgatgaacgcagcccagaatcgagtattcttgatggaatgataagacagttgcagcagcagcaagatcagagaatgggagcagatcaggatactattccaagaggactttcaaatggtgaagaaacaccccggagaggttttagaaggctgagcttagacattcagtcccctccaaatattggtctgcgtcgtagtggacaagttgaaggtgttcgtcagatgcatcaaaacgctccacgcagtcagattgctacagaacgtgacctgcaggcttggaaacgaagagtggttgtaccagaggtaccactaggcatatttaggaagctggaagacttccgattagagaaaggtgaagaggaaagaaatctttatataataggaagaaaaagaaagactcttcagctctcacataagtcggattcagtggttttggtatcacagtctagacaaaggacatgtaggcgtaaatatccaaattatggtagaagaaatcgtagctggcgtgagttatcttctggaaatgagtcttcaagctctgtaagacatgagacttcctgtgatcagagtgaaggttctggttcttcagaagaggatgaatggagaagtgacagaaaaagtgagagttacagcgaaagttcaagtgactcttcatctagatattccgattggacagctgatgcgggcatcaatttgcagcctcctttaagaacatcatgtcgtcgacgaattactcgattttgtagtagttcagaagatgaaatatctactgagaatttatctcctccaaaaagaagacgaaagagaaagaaagaaaataagcctaagaaggagaatttgcggaggatgactccagcagagcttgcaaatatggagcatttatatgaatttcaccctccagtttggattactgacaccacacttagaaaatctccttttgttcctcaaatgggtgatgaggtaatatattttcgacagggtcatgaagcttatattgaggctgtaagaagaaataatatttatgaactgaaccctaataaggagccatggagaaaaatggatcttaggtatcagagaagcagacactggggggaaggttgactatggcaaatccatttgatggatactccatccaggatcaagaattggttaaaatagttggaatacgatatgaagttgggccccctacactctgttgcctaaaactagcatttatagatccagcaactggaaaacttatggacaaatctttctctattagatatcatgatatgccagatgttattgactttcttgtattgcgtcaattttatgatgaagcaagacagaggaattggcagtcttgtgacagattccgctctattattgatgatgcttggtggtttggaacagtgttaagtcaagagccatatcaaccacagtatcctgatagtcatttccagtgttatattgttaggtgggataatactgaaattgaaaaacttagcccatgggacatggaaccaattcctgataatgttgatccacctgaagaattaggagctagtatttctgtcacaacagatgagctagagaaattgctctataaaccacaagctggtgaatggggtcagaaatcaagagatgaagaatgtgatagaattatcagtggtatagatcaacttttgaatcttgatatagcagcagcttttgcaggccctgttgatttgtgtacatacccgaagtactgtactgtagtagcttatccaaccgatctttacacaattcgaatgagacttgttaatcgattttacaggttagtagaaacctgctttcaaaatgtttaaaaagctatatttggcaatattgactagggtaaacaaagaaagagatagtggtagaattgggggctgattagcattttctgtttcattattctctttcattgtcagatggtgttagatgcctatgggtaggtgtgggtagggccaggcagaagattgactaccatatttcaccctcgtttttttttcagtgattatttccatatcactgaaattttacttttattccacttatttcagtaaactttcactggtactttagtaatgagaatttttctatcctcatacatgattgaagacataatttgttttaaaattaatagccataat

SEQ ID NO: 36 - DNA, 3668 bp, Homo sapien
ggtccaggcggcgcgcacggtatggcggcggcggcggcggcggcggcggcgcgcgcctgagaagaggggacgccagcccggtcaggcctcggcgcggcctacacgctccgctcgctcgctcgctcccgcctcccgccccgcgcccggccatggcggagccgtcgtccgcccgacgcccggtgcctctcatcgagtcggagctgtacttccttatcgcccggtacctatcggcgggcccgtgtcggagagcggcccaggtgctggtgcaggagctggagcagtaccagttgttgccgaagagattggactgggagggcaacgagcacaacaggagctacgaggagttggtcttgtccaataagcatgtggctcctgatcatcttttgcaaatctgccagcgcatcggtcctatgttggataaagaaattccacccagtatttcaagagtcacttctttacttggtgcaggaaggcagtctttgctacgtacagcaaaagactgcaggcacacagtttggaagggctctgcctttgctgctcttcatagaggaagacctcctgaaatgccagtgaattatggttccccaccaaatcttgtggagatacatcgaggaaaacaactcacagggtgttccacttttagtacagcatttccaggaactatgtatcagcatataaaaatgcacagaaggattctcggacatctatctgctgtttactgtgtagcatttgataggacaggacatagaatctttacaggttcagatgactgtttggtaaagatttggtcaacacataatggccgcttgttatctacattaagaggtcattctgcagaaatttcagatatggcagtaaactatgagaatacaatgattgctgcggggagctgtgataaaattattagagtgtggtgcttgagaacttgtgccccagttgctgtgctccaaggacacacaggatcaattacatctttacagtttagcccgatggccaaaggctctcaaagatacatggtttccactggtgctgatgggacagtttgcttttggcaatgggatttagaatccttaaaatttagcccacgtcccctgaagttcactgaaaagcctaggccaggcgttcaaatgctttgttcttcttttagtgttggtggtatgtttttagccacaggtagtactgatcatgtaatcagaatgtattttttgggttttgaagcacccgaaaaaatcgcagaacttgaaagccacactgataaagtagatagtatccaattttgtaacaatggtgatcggttcctaagtggtagcagagatggaacagcacggatttggagatttgagcagttagaatggaggagcattttattggatatggctaccagaatctcaggggacttatcttccgaagaggaaaggtttatgaaacctaaagtaacaatgatagcttggaatcaaaatgatagcattgttgtcacagctgtgaatgatcatgtcctcaaagtgtggaattcttacactggacaactgcttcataacttaatggtaggtaatttctggtacaatgtaacaaatgagattttttgaaatatgattgtaattttgaagctataaaaataatatattgaacaagttgtttctctcatgtaaactatgaaatgattagaaatttttataattataaattattgtcgaatacatttctaaaagtatatgctgtaacagtatgtatttttaaattttcaatttgtaacttgtaaaccctccttaatgttatgactttgttaaataaagggacatgctgatgaagtatttgttctggagacacatccctttgattccagaattatgttatctgcaggacatgatggcagcatatttatatgggatattacaaaaggtaccaagatgaaacattattttaatatgattgaaggacaaggacatggagctgtgtttgactgtaagttttcacaggatggacagcattttgcctgtacagattctcatgggcaccttctgatatttggttttggatgcagcaaaccatatgaaaagattcctgatcagatgttcttccatactgactatcgaccacttattagagattctaataattatgtcttagatgagcaaactcagcaggctcctcatcttatgcctccaccattcttggtagatgtagatggaaatcctcatccaaccaagtatcagagattagtaccaggccgagaaaattctgcagatgaacatttgattccacagctgggctatgtggcaacaagtgatggagaggtgattgaacaaattataagcctgcaaaccaatgataatgatgaacgcagcccagaatcgagtattcttgatggaatgataagacagttgcagcagcagcaagatcagagaatgggagcagatcaggatactattccaagaggactttcaaatggtgaagaaacaccccggagaggttttagaaggctgagcttagacattcagtcccctccaaatattggtctgcgtcgtagtggacaagttgaaggtgttcgtcagatgcatcaaaacgctccacgcagtcagattgctacagaacgtgacctgcaggcttggaaacgaagagtggttgtaccagaggtaccactaggcatatttaggaagctggaagacttccgattagagaaaggtgaagaggaaagaaatctttatataataggaagaaaaagaaagactcttcagctctcacataagtcggattcagtggttttggtatcacagtctagacaaaggacatgtaggcgtaaatatccaaattatggtagaagaaatcgtagctggcgtgagttatcttctggaaatgagtcttcaagctctgtaagacatgagacttcctgtgatcagagtgaaggttctggttcttcagaagaggatgaatggagaagtgacagaaaaagtgagagttacagcgaaagttcaagtgactcttcatctagatattccgattggacagctgatgcgggcatcaatttgcagcctcctttaagaacatcatgtcgtcgacgaattactcgattttgtagtagttcagaagatgaaatatctactgagaatttatctcctccaaaaagaagacgaaagagaaagaaagaaaataagcctaagaaggagaatttgcggaggatgactccagcagagcttgcaaatatggagcatttatatgaatttcaccctccagtttggattactgacaccacacttagaaaatctccttttgttcctcaaatgggtgatgaggtaatatattttcgacagggtcatgaagcttatattgaggctgtaagaagaaataatatttatgaactgaaccctaataaggagccatggagaaaaatggatcttaggtatcagagaagcagacactggggggaaggttgactatggcaaatccatttgatggatactccatccaggtagggactttcacttgtttaccgtcctgtccctactgcctagaagaggtcatagcatatggtagattctcaacaaatattacttactgaatgtattaggcagaaacttaatatcaagattttgaagaacacttatgaataagtagaatgcttacacattttcactgtataatataaagctatataaataaaaatgtgcatt

SEQ ID NO: 37 - DNA, 2944 bp, Homo sapien
ggtccaggcggcgcgcacggtatggcggcggcggcggcggcggcggcggcgcgcgcctgagaagaggggacgccagcccggtcaggcctcggcgcggcctacacgctccgctcgctcgctcgctcccgcctcccgccccgcgcccggccatggcggagccgtcgtccgcccgacgcccggtgcctctcatcgagtcggagctgtacttccttatcgcccggtacctatcggcgggcccgtgtcggagagcggcccaggtgctggtgcaggagctggagcagtaccagttgttgccgaagagattggactgggagggcaacgagcacaacaggagctacgaggagttggtcttgtccaataagcatgtggctcctgatcatcttttgcaaatctgccagcgcatcggtcctatgttggataaagaaattccacccagtatttcaagagtcacttctttacttggtgcaggaaggcagtctttgctacgtacagcaaaagactgcaggcacacagtttggaagggctctgcctttgctgctcttcatagaggaagacctcctgaaatgccagtgaattatggttccccaccaaatcttgtggagatacatcgaggaaaacaactcacagggtgttccacttttagtacagcatttccaggaactatgtatcagcatataaaaatgcacagaaggattctcggacatctatctgctgtttactgtgtagcatttgataggacaggacatagaatctttacaggttcagatgactgtttggtaaagatttggtcaacacataatggccgcttgttatctacattaagaggtcattctgcagaaatttcagatatggcagtaaactatgagaatacaatgattgctgcggggagctgtgataaaattattagagtgtggtgcttgagaacttgtgccccagttgctgtgctccaaggacacacaggatcaattacatctttacagtttagcccgatggccaaaggctctcaaagatacatggtttccactggtgctgatgggacagtttgcttttggcaatgggatttagaatccttaaaatttagcccacgtcccctgaagttcactgaaaagcctaggccaggcgttcaaatgctttgttcttcttttagtgttggtggtatgtttttagccacaggtagtactgatcatgtaatcagaatgtattttttgggttttgaagcacccgaaaaaatcgcagaacttgaaagccacactgataaagtagatagtatccaattttgtaacaatggtgatcggttcctaagtggtagcagagatggaacagcacggatttggagatttgagcagttagaatggaggagcattttattggatatggctaccagaatctcaggggacttatcttccgaagaggaaaggtttatgaaacctaaagtaacaatgatagcttggaatcaaaatgatagcattgttgtcacagctgtgaatgatcatgtcctcaaagtgtggaattcttacactggacaactgcttcataacttaatggtaggtaatttctggtacaatgtaacaaatgagattttttgaaatatgattgtaattttgaagctataaaaataatatattgaacaagttgtttctctcatgtaaactatgaaatgattagaaatttttataattataaattattgtcgaatacatttctaaaagtatatgctgtaacagtatgtatttttaaattttcaatttgtaacttgtaaaccctccttaatgttatgactttgttaaataaagggacatgctgatgaagtatttgttctggagacacatccctttgattccagaattatgttatctgcaggacatgatggcagcatatttatatgggatattacaaaaggtaccaagatgaaacattattttaatatgattgaaggacaaggacatggagctgtgtttgactgtaagttttcacaggatggacagcattttgcctgtacagattctcatgggcaccttctgatatttggttttggatgcagcaaaccatatgaaaagattcctgatcagatgttcttccatactgactatcgaccacttattagagattctaataattatgtcttagatgagcaaactcagcaggctcctcatcttatgcctccaccattcttggtagatgtagatggaaatcctcatccaaccaagtatcagagattagtaccaggccgagaaaattctgcagatgaacatttgattccacagctgggctatgtggcaacaagtgatggagaggtgattgaacaaattataagcctgcaaaccaatgataatgatgaacgcagcccagaatcgagtattcttgatggaatgataagacagttgcagcagcagcaagatcagagaatgggagcagatcaggatactattccaagaggactttcaaatggtgaagaaacaccccggagaggttttagaaggctgagcttagacattcagtcccctccaaatattggtctgcgtcgtagtggacaagttgaaggtgttcgtcagatgcatcaaaacgctccacgcagtcagattgctacagaacgtgacctgcaggcttggaaacgaagagtggttgtaccagaggtaccactaggcatatttaggaagctggaagacttccgattagagaaaggtgaagaggaaagaaatctttatataataggaagaaaaagaaagactcttcagctctcacataagtcggattcagtggttttggtatcacagtctagacaaaggacatgtaggcgtaaatatccaaattatggtagaagaaatcgtagctggcgtgagttatcttctggaaatgagtcttcaagctctgtaagacatgtgagtggaaaactttaaaatgttataagataatcttaaatgaatttggcttaattctttacttt

SEQ ID NO: 38 - DNA, 1956 bp, Homo sapien
caaaatagacggggacatgttacagtaggttagaagatcaacagtgctatggaggaaaagaacacaggaagagtaaaagagaaatgggcacagagtgaggataagtttaaattgtacttagggtggttagggaaggtctcactgaaaatgtgacatttgagccaagacttgaaggaggggagggactcagccatgcagtttttccaggagaagagcattcctgcagaacaaacagcaagtacaaataccctgaggcagccgtgggccaggtcacgccacagtgaggctggagcactatgagaaggggagcagtcaggtgagaggtaagacaaaccagagagaggccagatcgtgtggacttggccttttcctctgggtctgatgggagcctctggaggattttgagagaggaaggacaagtccgtctttagtttgtttttttttttttcttgagatggagtttcgctctcgttgcccaggctggagtacaatggctcgatctcggctcactgcaacctccacctcctgggttcaggcaattctcctgcctcagcctcctgagtagctgggattacaagcacacgccaccatacccggctaatttttgtatttttagtagagacagggtttcactgtgttggtcaggctggtctcaaactcctgacctcaggtaatccacctgccccggcctcccaaagtgctgggattacaggcatgagccactacgcctggccctgtcttaagttttaacaggatccctccagctgcctgagaatacacagaaataggatgaaggtagaagcagtaagacataagaggttgtggtgctcttccggatgagaagtgcttagattctggatacattttgaagagctgtacttccttatcgcccggtacctatcggcgggcccgtgtcggagagcggcccaggtgctggtgcaggagctggagcagtaccagttgttgccgaagagattggactgggagggcaacgagcacaacaggagctacgaggagttggtgagcattgggcacgtttgctccccgggttttccgtgcaccgccccccgcccccgccccttcccctcgcggggaccccggcccgtggggtgcaaagtgtgacccgcactggggggcggcccgggcatagctgcgttcccggctgaagattttgttttgtttttgaggcggccaggtttgttttggcaggaaacagtcattgggggcggcgcggggcggagcggtgggggcgactcgcggaggtcctgcggcaggggtggggctccaggtgcggccgcctctgcgggggtgtggcgtgcgcagccagccattcaactgggcggtttcattcgcttccccactccaccgcgcttgtaactcgcgctctgattggcctccctgctcttgccccgcccgggtctgtccccccacttgttccctaggaatagaatcattggtctctgaaggtggagaaatgttcttgtgttgagctttttattttttgttttgtcagcagcgtcataaaaatcttgcagctgtatgaatatgccactgtagtgcttgtgctcctttctactgtacaatatttgttgaacgcagtagttgattgatgagtttcacactgatcttgtagataacacaataaagtgctttaaataggcacttttcttttgagctcggttaatcttgcattacagtctcatttcttttgtgaacttggttaatgtttctatataacttgcttttatctatagttacagcagttgcagggattcgtttgtttttactggagacatttttcaggaatatatttttgccgtttcgttattaggataaaggaattcattaattgccaggccatattcagcatcttgtataaggaaaacaattgagaaagaaaagagcttctgagtgatcttttaccacagttggaagacctgtaacacttgagtggta

SEQ ID NO: 39 - DNA, 473 bp, Homo sapien
gaaaaataaacacttggcattaaatgtagaattatatcatacaatactaaagatgaaaggtctttcatctttagtattgtatgatataattctacattgaaaaataaacacttggcattaaatgggacttggagtcaaaagatctggttttatggtccatctttaccaatcatttgctgtggatctctttaaaggtcctggaacctttgagcctcagttacctcacttgtaaattggcaaaaatacctacctcacagggttgttgtgaggattcaatgagctaatgtatgttgaaagcactttgtgaattgtaaagtgctacacaaatgttagttgttgttgctgctgtatctgagatgtcttaattttctttttcttcagaaatagtctaataaacctccagggcttttctgttaaagtatactagttggtaaaatgttgaataaacagtttattacaatataaaaaaaaat

SEQ ID NO: 40 - DNA, 1398 bp, Homo sapien
ggtccaggcggcgcgcacggtatggcggcggcggcggcggcggcggcggcgcgcgcctgagaagaggggacgccagcccggtcaggcctcggcgcggcctacacgctccgctcgctcgctcgctcccgcctcccgccccgcgcccggccatggcggagccgtcgtccgcccgacgcccggtgcctctcatcgagtcggagctgtacttccttatcgcccggtacctatcggcgggcccgtgtcggagagcggcccaggtgctggtgcaggagctggagcagtaccagttgttgccgaagagattggactgggagggcaacgagcacaacaggagctacgaggagttggtcttgtccaataagcatgtggctcctgatcatcttttgcaaatctgccagcgcatcggtcctatgttggataaagaaattccacccagtatttcaagagtcacttctttacttggtgcaggaaggcagtctttgctacgtacagcaaaagactgcaggcacacagtttggaagggctctgcctttgctgctcttcatagaggaagacctcctgaaatgccagtgaattatggttccccaccaaatcttgtggagatacatcgaggaaaacaactcacagggtgttccacttttagtacagcatttccaggaactatgtatcagcatataaaaatgcacagaaggattctcggacatctatctgctgtttactgtgtagcatttgataggacaggacatagaatctttacaggttcagatgactgtttggtaaagatttggtcaacacataatggccgcttgttatctacattaagaggtcattctgcagaaatttcagatatggcagtaaactatgagaatacaatgattgctgcggggagctgtgataaaattattagagtgtggtgcttgagaacttgtgccccagttgctgtgctccaaggacacacaggatcaattacatctttacagtttagcccgatggccaaaggctctcaaagatacatggtttccactggtgctgatgggacagtttgcttttggcaatgggatttagaatccttaaaatttagcccacgtcccctgaagttcactgaaaagcctaggccaggcgttcaaatgctttgttcttcttttagtgttggtaagaacttcttcacatttttttcttagttttttttttttaaacatctattaaatgaccacttggttgctaagaacttttattagctacatggtaaatgacttctggtgtttatttcattaggttcaatttatgatgtttattttgttagccttgttcttccagtcctccagtctgcctttctctgatttctggtagtaatcagtgatataagagatggctggtaaaagggaggcttgaggtgtc

SEQ ID NO: 41 - DNA, 938 bp, Homo sapien
gcgctgcttgcctgtttttgtattgtgcttttggcttttttatctgtatcatatggtattttgtagattaaaaaaatgttaatgaatgttagcagagaaatgcctcagacttgatcatttctctcctaggtgacagattccgctctattattgatgatgcttggtggtttggaacagtgttaagtcaagagccatatcaaccacagtatcctgatagtcatttccagtgttatattgttaggtgggataatactgaaattgaaaaacttagcccatgggacatggaaccaattcctgataatgttgatccacctgaagaattaggagctagtatttctgtcacaacagatgagctagagaaattgctctataaaccacaagctggtgaatggggtcagaaatcaagagatgaagaatgtgatagaattatcagtggtatagatcaacttttgaatcttgatatagcagcagcttttgcaggccctgttgatttgtgtacatacccgaagtactgtactgtagtagcttatccaaccgatctttacacaattcgaatgagacttgttaatcgattttacaggttagtagaaacctgctttcaaaatgtttaaaaagctatatttggcaatattgactagggtaaacaaagaaagagatagtggtagaattgggggctgattagcattttctgtttcattattctctttcattgtcagatggtgttagatgcctatgggtaggtgtgggtagggccaggcagaagattgactaccatatttcaccctcgtttttttttcagtgattatttccatatcactgaaattttacttttattccacttatttcagtaaactttcactggtactttagtaatgagaatttttctatcctcatacatgattgaagacataatttgttttaaaattaatagccataat

SEQ ID NO: 42 - DNA, 9954 bp, Homo sapien
ggtccaggcggcgcgcacggtatggcggcggcggcggcggcggcggcggcgcgcgcctgagaagaggggacgccagcccggtcaggcctcggcgcggcctacacgctccgctcgctcgctcgctcccgcctcccgccccgcgcccggccatggcggagccgtcgtccgcccgacgcccggtgcctctcatcgagtcggagctgtacttccttatcgcccggtacctatcggcgggcccgtgtcggagagcggcccaggtgctggtgcaggagctggagcagtaccagttgttgccgaagagattggactgggagggcaacgagcacaacaggagctacgaggagttggtcttgtccaataagcatgtggctcctgatcatcttttgcaaatctgccagcgcatcggtcctatgttggataaagaaattccacccagtatttcaagagtcacttctttacttggtgcaggaaggcagtctttgctacgtacagcaaaagactgcaggcacacagtttggaagggctctgcctttgctgctcttcatagaggaagacctcctgaaatgccagtgaattatggttccccaccaaatcttgtggagatacatcgaggaaaacaactcacagggtgttccacttttagtacagcatttccaggaactatgtatcagcatataaaaatgcacagaaggattctcggacatctatctgctgtttactgtgtagcatttgataggacaggacatagaatctttacaggttcagatgactgtttggtaaagatttggtcaacacataatggccgcttgttatctacattaagaggtcattctgcagaaatttcagatatggcagtaaactatgagaatacaatgattgctgcggggagctgtgataaaattattagagtgtggtgcttgagaacttgtgccccagttgctgtgctccaaggacacacaggatcaattacatctttacagtttagcccgatggccaaaggctctcaaagatacatggtttccactggtgctgatgggacagtttgcttttggcaatgggatttagaatccttaaaatttagcccacgtcccctgaagttcactgaaaagcctaggccaggcgttcaaatgctttgttcttcttttagtgttggtggtatgtttttagccacaggtagtactgatcatgtaatcagaatgtattttttgggttttgaagcacccgaaaaaatcgcagaacttgaaagccacactgataaagtagatagtatccaattttgtaacaatggtgatcggttcctaagtggtagcagagatggaacagcacggatttggagatttgagcagttagaatggaggagcattttattggatatggctaccagaatctcaggggacttatcttccgaagaggaaaggtttatgaaacctaaagtaacaatgatagcttggaatcaaaatgatagcattgttgtcacagctgtgaatgatcatgtcctcaaagtgtggaattcttacactggacaactgcttcataacttaatgggacatgctgatgaagtatttgttctggagacacatccctttgattccagaattatgttatctgcaggacatgatggcagcatatttatatgggatattacaaaaggtaccaagatgaaacattattttaatatgattgaaggacaaggacatggagctgtgtttgactgtaagttttcacaggatggacagcattttgcctgtacagattctcatgggcaccttctgatatttggttttggatgcagcaaaccatatgaaaagattcctgatcagatgttcttccatactgactatcgaccacttattagagattctaataattatgtcttagatgagcaaactcagcaggctcctcatcttatgcctccaccattcttggtagatgtagatggaaatcctcatccaaccaagtatcagagattagtaccaggccgagaaaattctgcagatgaacatttgattccacagctgggctatgtggcaacaagtgatggagaggtgattgaacaaattataagcctgcaaaccaatgataatgatgaacgcagcccagaatcgagtattcttgatggaatgataagacagttgcagcagcagcaagatcagagaatgggagcagatcaggatactattccaagaggactttcaaatggtgaagaaacaccccggagaggttttagaaggctgagcttagacattcagtcccctccaaatattggtctgcgtcgtagtggacaagttgaaggtgttcgtcagatgcatcaaaacgctccacgcagtcagattgctacagaacgtgacctgcaggcttggaaacgaagagtggttgtaccagaggtaccactaggcatatttaggaagctggaagacttccgattagagaaaggtgaagaggaaagaaatctttatataataggaagaaaaagaaagactcttcagctctcacataagtcggattcagtggttttggtatcacagtctagacaaaggacatgtaggcgtaaatatccaaattatggtagaagaaatcgtagctggcgtgagttatcttctggaaatgagtcttcaagctctgtaagacatgagacttcctgtgatcagagtgaaggttctggttcttcagaagaggatgaatggagaagtgacagaaaaagtgagagttacagcgaaagttcaagtgactcttcatctagatattccgattggacagctgatgcgggcatcaatttgcagcctcctttaagaacatcatgtcgtcgacgaattactcgattttgtagtagttcagaagatgaaatatctactgagaatttatctcctccaaaaagaagacgaaagagaaagaaagaaaataagcctaagaaggagaatttgcggaggatgactccagcagagcttgcaaatatggagcatttatatgaatttcaccctccagtttggattactgacaccacacttagaaaatctccttttgttcctcaaatgggtgatgaggtaatatattttcgacagggtcatgaagcttatattgaggctgtaagaagaaataatatttatgaactgaaccctaataaggagccatggagaaaaatggatcttagggatcaagaattggttaaaatagttggaatacgatatgaagttgggccccctacactctgttgcctaaaactagcatttatagatccagcaactggaaaacttatggacaaatctttctctattagatatcatgatatgccagatgttattgactttcttgtattgcgtcaattttatgatgaagcaagacagaggaattggcagtcttgtgacagattccgctctattattgatgatgcttggtggtttggaacagtgttaagtcaagagccatatcaaccacagtatcctgatagtcatttccagtgttatattgttaggtgggataatactgaaattgaaaaacttagcccatgggacatggaaccaattcctgataatgttgatccacctgaagaattaggagctagtatttctgtcacaacagatgagctagagaaattgctctataaaccacaagctggtgaatggggtcagaaatcaagagatgaagaatgtgatagaattatcagtggtatagatcaacttttgaatcttgatatagcagcagcttttgcaggccctgttgatttgtgtacatacccgaagtactgtactgtagtagcttatccaaccgatctttacacaattcgaatgagacttgttaatcgattttacaggaggctgtctgcgttagtttgggaagtcagatatatagaacataatgccagaacatttaacgaacctgagagtgtaattgcaagatcagctaaaaagataactgaccaacttttaaaatttatcaagaatcaacactgtacaaatatctcagaactttctaacacatctgaaaatgatgagcaaaatgctgaggatttggatgatagtgatcttcctaaaacatcttctggaagaaggagagtccatgatgggaaaaaaagcatcagagctacgaactatgttgaaagcaactggaagaaacagtgtaaggaactagtgaacttaatttttcagtgtgaagattctgaaccatttagacaacctgttgatttggttgaatatccagactacagagatattatagataccccaatggattttggaacagtaagggaaactctagatgcgggaaattatgacagccctttggagttttgcaaagacatccggctgatatttagcaatgcaaaagcgtatacaccaaacaaaagatcaaagatttatagtatgaccttgagattatctgccttatttgaagaaaaaatgaagaaaatctcttctgattttaaaattggtcaaaaattcaatgaaaaacttcgaagaagccagaggttcaagcaacggcaaaattgtaaaggtgacagtcagcctaacaaaagtatcagaaacctcaagccgaagaggttaaaatctcagacaaaaataattcctgagttggtaggttctcctacccagtctacctcaagtaggacagcttatcttggaacccacaagacaagtgctggtatctcttcaggtgttacttctggtgactcttcagattcagcagaatcatcagaaaggaggaaaagaaatagacctataacaaatggttctacattatctgaaagtgaagtggaagattctttagctacctctttgtcatcgtcagcttccagtagttctgaggaaagcaaagagagttccagagctcgtgaatcctcctcacgcagtgggctatccagaagcagcaatctcagggtaaccagaactagagctgctcaaagaaaaactggtcccgtttcattagcaaatggatgtggcagaaaagccactcgaaagagagtctatttaagtgattctgataacaattcattggagactggtgaaattctaaaagccagagctggaaataaccgaaaagtcttaaggaagtgtgctgctgtggctgccaataaaataaagctaatgagtgatgtagaagagaattctagctctgaaagtgtctgttctggtcggaagctgcctcaccgcaatgcttctgctgtagctagaaaaaagttattacataattctgaagatgaacagagcttaaagtcagaaattgaagaagaggagctaaaagatgaaaatcaacyattaccagtgtccagttctcacactgcccagagcaatgttgatgaatctgaaaacagagactcagagtcagaaagtgatttgcgggtagcccggaaaaattggcatgctaatggttacaagtcccatactccagcaccttcaaagacaaaatttcttaaaatagagtcttctgaggaagactctaaaagtcatgattcagatcatgcatgtaacagaactgctggcccatcaacgtctgtgcagaaacttaaggcagagagcatctcagaggaagcagattctgaaccaggaagatctggtggtaggaaatacaatacatttcacaagaatgcgagtttctttaaaaaaaccaagattctgagtgactcagaagactctgaatctgaagagcaagatagagaagatgggaaatgtcataaaatggaaatgaacccaatttcaggaaatctgaactgtgaccctattgctatgtcccagtgttcctcagatcatggatgtgaaactgatttagattcagatgatgacaaaatagaaaaaccaaacaattttatgaaagattctgcatcacaagacaatggactaagcagaaaaatttccaggaaaagggtctgttccagtgactcagacagtagtttacaggtggttaagaaatcatcaaaagccagaacaggtctcctgaggattactcgaagatgtgcagctacggctgccaataagatcaagctcatgagtgatgtagaagatgtcagtttagaaaatgtgcacactagaagcaaaaatggaaggaaaaaacctctccatcttgcttgtactacagctaagaagaaattgagtgattgtgaaggaagtgtacattgtgaagtaccaagtgaacagtatgcctgtgaaggcaagccacctgatcctgactccgaaggtagtacaaaagtgcttagtcaggctctaaatggagactcagactctgaagatatgttgaattcagaacacaagcacaggcataccaatattcacaaaatagatgcaccttctaaaagaaaaagttcctctgttacatcttcaggagaagattcaaaaagtcatattccagggagtgagactgataggacattttcttcagagtcaaccttggcacaaaaagctactgcagagaataattttgaagtggaactgaattatgggctgcgcaggtggaatggcagaagactcaggacctatggaaaggctccttttagtaagacaaaagtgattcatgattcacaggaaacagcagagaaggaagtaaaaaggaagagatcgcatcctgaattggaaaatgtgaaaatctctgaaacaactgggaattcaaagtttagacctgatactagttccaaatcatcagatttgggatctgtaactgaatcagatattgactgtactgataatacaaaaaccaaaaggaggaaaacgaaaggaaaagcaaaagtagttagaaaagaatttgttcctagagacagagaacccaatacaaaagtgagaacatgtatgcataatcagaaggatgcagtgcagatgcctagtgaaactctgaaagcaaaaatggtacctgagaaagttccccgcagatgtgctactgttgctgcaaataaaataaagataatgagtaatctaaaagaaacgatctcaggaccagaaaatgtctggattaggaagagtagcagaaaactgccccatcgaaatgcttctgctgcggctaagaaaaaattactgaatgtttataaagaggatgatacaaccataaattctgaaagtgaaaaagagctagaagatattaatagaaaaatgctttttttaagggggttcagatcctggaaagaaaatgcacaatagtgactatgagaatgtagaagtggcatctgaaaacaattggtacacaagtaaactggcagttacattctgctcccagctctaaaattactcccttattggcatctttggaggaattttctaaaagccataatccagtgggttcctcccagtcagctcttgtacagacatgtgctctggggaattctgaggaggaaataaattgcagagtctgtaggtggagaggtggaaagaaaagacaaatggcctgctataagactactattcctttccagaatgcaaggccttgaagacatgattccttagaggaagaatataatgggaagtgtacaggctaggaagaacttgaagtgaacaaatttcaaaatcttaacctgatgctaattttcagggttctccattacagtgtaaaaattcagaccacgacaactatggtgtcatgaggaaaaaaaatcaggcatttttccaaaggaagtgctaatgggcctatttgacttctgagtgaagcaaaaactacccagatccattccctacaattcacatccccaaaggtcaaaaacaaactaggaggacctgggaatttcagctggagatactgattattgagttctgaagtagagtgttggaaataggcaattagagaaagtccattgatgtcattttgtttataatattgcagttcatactgaatgaccacttgatatgactaattcagggaatatatatttttctatgaaagctatgaatgttactatcacggcttttccttatttttacttgtatgtagcagcatttacagaaatgccaaaaatgtgcctcattaagaggcaggtcttaatcagttagataaaaataaaatgtatagcttaagatcaaaacagtcatatttttagatacagtgaaatcttttatgtttctctacagcaccttaaaaattagaacttgaatactttgagtaaacttactacaatctcatcccaacaaactttaatggtagcatgtttggcctatttcattgtggcctgtactaggattagaaaatttggtcgtggtataacaaagaagtgtatttacaataggatttaatttgttgttaatatgtatttgttgaaattaaaattgccagattaaatgaatatactgtcgcatctttttaacatagtaacgtgttactggaaaaattaagttgttgaaagtaagttgttttcccatttaaaaatatctgaatatatgatttgcatgtgtaaatctgaaaaactaaactacagaaacctagggttttctatttcttttttaagtcaaatgcatttttttttttgttatacagatgaaccaagtgtctaaaatacttgagaaatttgtggttgcatgtctgttttaaaaaaaaggctttttgttttttagcataagccagaatattctaacctactaagtctgtgtcctttgctccttttgtagtatactttcatctaaattactgatcccaatatgttgatacacaggtgagaaggaagaattcctaataaactgctattacttttaggtgcatggggtttgatttttgagctctaatgaaatgcttaaacttctttccagttcaaattttacacttaatttataatatttattgagtatattatgtcctcaacaagtaactataaaatgaaatacttaactcggtgaagactattttatgcaaagtttttttttttttttttttttttttttagcaatttcagtgtaatgaaagaatttaagctttgaatttataatttgctgtggtggggttaatttctgtcagtatttgagattgtattatcagtcttgcataatgaaatccttttttggctaagtatttaattcgaacatatttgcctttttaaaaagtgcttggcctaaacttattgtaactgcatgaaataagcatttgcttaaaacttaacattgtaaaattgttctctctgaaatgtgtgcagaatttaaatcatggccaaatgtattactattaccctatttacagtaatttgctttgcagaaaatatttcttcatcatggaactgtgaaatcaaattgaagatcttactggtaaaaatgacaaattaacaaaaggactaagacaagtggtgcccaaacaacctttttattctgcagttccatcatcataatagaccagttaacccaggagtcctaatgttttaaaacatcattgtggtgatcttgtttattctatctcactaaggatatccagtttcctaagctcttactggctagcaatttcgtcttaattttattgctaaatgttcaaattttgcttccaaactcactttatttttgcagatgtgtacatctgctaaatactaattttatgtaaatgattttgttgattatctttccacatcttaaaatgtttctaacagctttgagattttatctcaacaggctctctctgaccccaaagtagtacttaccttcgtgactactgacaaagtcacaaaatgcaggcgatgtcatgtatttcggtacaactaaatctaggaaacggttttttcattgcattactgcatattttcattttcatttaaattatgtcccctttttctcttgcttgaaacagtgctcctcgaactttgtcttccagcacattttaaagagaaccaattaaagaacaatcacacattctgcttattaaaggctatttaaaaagaaacattttgtattagaaaatggccaactttaaaacactattttttacactcataaaaatgttttttaaatcgccttgacaatcatcagcttttgaaatgtgaattcctattgccagagtaaaggtctcgtttttatacca

SEQ ID NO: 43 - DNA, 7951 bp, Homo sapien
ggtccaggcggcgcgcacggtatggcggcggcggcggcggcggcggcggcgcgcgcctgagaagaggggacgccagcccggtcaggcctcggcgcggcctacacgctccgctcgctcgctcgctcccgcctcccgccccgcgcccggccatggcggagccgtcgtccgcccgacgcccggtgcctctcatcgagtcggagctgtacttccttatcgcccggtacctatcggcgggcccgtgtcggagagcggcccaggtgctggtgcaggagctggagcagtaccagttgttgccgaagagattggactgggagggcaacgagcacaacaggagctacgaggagttggtcttgtccaataagcatgtggctcctgatcatcttttgcaaatctgccagcgcatcggtcctatgttggataaagaaattccacccagtatttcaagagtcacttctttacttggtgcaggaaggcagtctttgctacgtacagcaaaagactgcaggcacacagtttggaagggctctgcctttgctgctcttcatagaggaagacctcctgaaatgccagtgaattatggttccccaccaaatcttgtggagatacatcgaggaaaacaactcacagggtgttccacttttagtacagcatttccaggaactatgtatcagcatataaaaatgcacagaaggattctcggacatctatctgctgtttactgtgtagcatttgataggacaggacatagaatctttacaggttcagatgactgtttggtaaagatttggtcaacacataatggccgcttgttatctacattaagaggtcattctgcagaaatttcagatatggcagtaaactatgagaatacaatgattgctgcggggagctgtgataaaattattagagtgtggtgcttgagaacttgtgccccagttgctgtgctccaaggacacacaggatcaattacatctttacagtttagcccgatggccaaaggctctcaaagatacatggtttccactggtgctgatgggacagtttgcttttggcaatgggatttagaatccttaaaatttagcccacgtcccctgaagttcactgaaaagcctaggccaggcgttcaaatgctttgttcttcttttagtgttggtggtatgtttttagccacaggtagtactgatcatgtaatcagaatgtattttttgggttttgaagcacccgaaaaaatcgcagaacttgaaagccacactgataaagtagatagtatccaattttgtaacaatggtgatcggttcctaagtggtagcagagatggaacagcacggatttggagatttgagcagttagaatggaggagcattttattggatatggctaccagaatctcaggggacttatcttccgaagaggaaaggtttatgaaacctaaagtaacaatgatagcttggaatcaaaatgatagcattgttgtcacagctgtgaatgatcatgtcctcaaagtgtggaattcttacactggacaactgcttcataacttaatggtaggtaatttctggtacaatgtaacaaatgagattttttgaaatatgattgtaattttgaagctataaaaataatatattgaacaagttgtttctctcatgtaaactatgaaatgattagaaatttttataattataaattattgtcgaatacatttctaaaagtatatgctgtaacagtatgtatttttaaattttcaatttgtaacttgtaaaccctccttaatgttatgactttgttaaataaagggacatgctgatgaagtatttgttctggagacacatccctttgattccagaattatgttatctgcaggacatgatggcagcatatttatatgggatattacaaaaggtaccaagatgaaacattattttaatatgattgaaggacaaggacatggagctgtgtttgactgtaagttttcacaggatggacagcattttgcctgtacagattctcatgggcaccttctgatatttggttttggatgcagcaaaccatatgaaaagattcctgatcagatgttcttccatactgactatcgaccacttattagagattctaataattatgtcttagatgagcaaactcagcaggctcctcatcttatgcctccaccattcttggtagatgtagatggaaatcctcatccaaccaagtatcagagattagtaccaggccgagaaaattctgcagatgaacatttgattccacagctgggctatgtggcaacaagtgatggagaggtgattgaacaaattataagcctgcaaaccaatgataatgatgaacgcagcccagaatcgagtattcttgatggaatgataagacagttgcagcagcagcaagatcagagaatgggagcagatcaggatactattccaagaggactttcaaatggtgaagaaacaccccggagaggttttagaaggctgagcttagacattcagtcccctccaaatattggtctgcgtcgtagtggacaagttgaaggtgttcgtcagatgcatcaaaacgctccacgcagtcagattgctacagaacgtgacctgcaggcttggaaacgaagagtggttgtaccagaggtaccactaggcatatttaggaagctggaagacttccgattagagaaaggtgaagaggaaagaaatctttatataataggaagaaaaagaaagactcttcagctctcacataagtcggattcagtggttttggtatcacagtctagacaaaggacatgtaggcgtaaatatccaaattatggtagaagaaatcgtagctggcgtgagttatcttctggaaatgagtcttcaagctctgtaagacatgagacttcctgtgatcagagtgaaggttctggttcttcagaagaggatgaatggagaagtgacagaaaaagtgagagttacagcgaaagttcaagtgactcttcatctagatattccgattggacagctgatgcgggcatcaatttgcagcctcctttaagaacatcatgtcgtcgacgaattactcgattttgtagtagttcagaagatgaaatatctactgagaatttatctcctccaaaaagaagacgaaagagaaagaaagaaaataagcctaagaaggagaatttgcggaggatgactccagcagagcttgcaaatatggagcatttatatgaatttcaccctccagtttggattactgacaccacacttagaaaatctccttttgttcctcaaatgggtgatgaggtaatatattttcgacagggtcatgaagcttatattgaggctgtaagaagaaataatatttatgaactgaaccctaataaggagccatggagaaaaatggatcttaggtatcagagaagcagacactggggggaaggttgactatggcaaatccatttgatggatactccatccaggatcaagaattggttaaaatagttggaatacgatatgaagttgggccccctacactctgttgcctaaaactagcatttatagatccagcaactggaaaacttatggacaaatctttctctattagatatcatgatatgccagatgttattgactttcttgtattgcgtcaattttatgatgaagcaagacagaggaattggcagtcttgtgacagattccgctctattattgatgatgcttggtggtttggaacagtgttaagtcaagagccatatcaaccacagtatcctgatagtcatttccagtgttatattgttaggtgggataatactgaaattgaaaaacttagcccatgggacatggaaccaattcctgataatgttgatccacctgaagaattaggagctagtatttctgtcacaacagatgagctagagaaattgctctataaaccacaagctggtgaatggggtcagaaatcaagagatgaagaatgtgatagaattatcagtggtatagatcaacttttgaatcttgatatagcagcagcttttgcaggccctgttgatttgtgtacatacccgaagtactgtactgtagtagcttatccaaccgatctttacacaattcgaatgagacttgttaatcgattttacaggaggctgtctgcgttagtttgggaagtcagatatatagaacataatgccagaacatttaacgaacctgagagtgtaattgcaagatcagctaaaaagataactgaccaacttttaaaatttatcaagaatcaacactgtacaaatatctcagaactttctaacacatctgaaaatgatgagcaaaatgctgaggatttggatgatagtgatcttcctaaaacatcttctggaagaaggagagtccatgatgggaaaaaaagcatcagagctacgaactatgttgaaagcaactggaagaaacagtgtaaggaactagtgaacttaatttttcagtgtgaagattctgaaccatttagacaacctgttgatttggttgaatatccagactacagagatattatagataccccaatggattttggaacagtaagggaaactctagatgcgggaaattatgacagccctttggagttttgcaaagacatccggctgatatttagcaatgcaaaagcgtatacaccaaacaaaagatcaaagatttatagtatgaccttgagattatctgccttatttgaagaaaaaatgaagaaaatctcttctgattttaaaattggtcaaaaattcaatgaaaaacttcgaagaagccagaggttcaagcaacggcaaaattgtaaaggtgacagtcagcctaacaaaagtatcagaaacctcaagccgaagaggttaaaatctcagacaaaaataattcctgagttggtaggttctcctacccagtctacctcaagtaggacagcttatcttggaacccacaagacaagtgctggtatctcttcaggtgttacttctggtgactcttcagattcagcagaatcatcagaaaggaggaaaagaaatagacctataacaaatggttctacattatctgaaagtgaagtggaagattctttagctacctctttgtcatcgtcagcttccagtagttctgaggaaagcaaagagagttccagagctcgtgaatcctcctcacgcagtgggctatccagaagcagcaatctcagggtaaccagaactagagctgctcaaagaaaaactggtcccgtttcattagcaaatggatgtggcagaaaagccactcgaaagagagtctatttaagtgattctgataacaattcattggagactggtgaaattctaaaagccagagctggaaataaccgaaaagtcttaaggaagtgtgctgctgtggctgccaataaaataaagctaatgagtgatgtagaagagaattctagctctgaaagtgtctgttctggtcggaagctgcctcaccgcaatgcttctgctgtagctagaaaaaagttattacataattctgaagatgaacagagcttaaagtcagaaattgaagaagaggagctaaaagatgaaaatcaacyattaccagtgtccagttctcacactgcccagagcaatgttgatgaatctgaaaacagagactcagagtcagaaagtgatttgcgggtagcccggaaaaattggcatgctaatggttacaagtcccatactccagcaccttcaaagacaaaatttcttaaaatagagtcttctgaggaagactctaaaagtcatgattcagatcatgcatgtaacagaactgctggcccatcaacgtctgtgcagaaacttaaggcagagagcatctcagaggaagcagattctgaaccaggaagatctggtggtaggaaatacaatacatttcacaagaatgcgagtttctttaaaaaaaccaagattctgagtgactcagaagactctgaatctgaagagcaagatagagaagatgggaaatgtcataaaatggaaatgaacccaatttcaggaaatctgaactgtgaccctattgctatgtcccagtgttcctcagatcatggatgtgaaactgatttagattcagatgatgacaaaatagaaaaaccaaacaattttatgaaagattctgcatcacaagacaatggactaagcagaaaaatttccaggaaaagggtctgttccagtgactcagacagtagtttacaggtggttaagaaatcatcaaaagccagaacaggtctcctgaggattactcgaagatgtgcagctacggctgccaataagatcaagctcatgagtgatgtagaagatgtcagtttagaaaatgtgcacactagaagcaaaaatggaaggaaaaaacctctccatcttgcttgtactacagctaagaagaaattgagtgattgtgaaggaagtgtacattgtgaagtaccaagtgaacagtatgcctgtgaaggcaagccacctgatcctgactccgaaggtagtacaaaagtgcttagtcaggctctaaatggagactcagactctgaagatatgttgaattcagaacacaagcacaggcataccaatattcacaaaatagatgcaccttctaaaagaaaaagttcctctgttacatcttcaggagaagattcaaaaagtcatattccagggagtgagactgataggacattttcttcagagtcaaccttggcacaaaaagctactgcagagaataattttgaagtggaactgaattatgggctgcgcaggtggaatggcagaagactcaggacctatggaaaggctccttttagtaagacaaaagtgattcatgattcacaggaaacagcagagaaggaagtaaaaaggaagagatcgcatcctgaattggaaaatgtgaaaatctctgaaacaactgggaattcaaagtttagacctgatactagttccaaatcatcagatttgggatctgtaactgaatcagatattgactgtactgataatacaaaaaccaaaaggaggaaaacgaaaggaaaagcaaaagtagttagaaaaggtaaaacttttacagctaacatatctaaaactgtgagacgtcaaagacaaagcaaacgccctaggttaagtgtggatgataatgactgggaggatttggactatgcaaaatctaaaagagttcttcgacgttcaaaaataaaaacgagaaatcagggtagaaggactgtgagataccatgatggggatgatgacagaagtttagaaaatgtgttagatttcaatggttgcaccttatgaccttgagggaaagccagttcatttaagaggaaatggactggcatttatggtgaaagctggctgttaaaattatttttttgtcttacaattcagggaatatatttatatttttctatgaaaagttatgaatgtgactaaatcatgactgttatttttatttgcacttgctggtctttgtagcagcattcagcacaggtgccaaaatatgcttcattttgggggcagatctattttgacagtatttgactacatatagcaagagtttgaaatatgttaaacactagacatcctggttatcaaaaccaatgagcattactttcatggcagcaagtgtcatgcagttattttctgaatttgtcaaagaggcagtagtttctaacccctgttctatagtagttacaacaatttcacaacctatgtttacagattcttcataaatacatgcatactgacactataatcatgggaggtgtaaccatgattagtaggcgaggtacctaccactttttttttttcttcccctggctacttgagtagaatgcattataccagatctggtcactttcattgaaatggtttctaattttcttcccaagtgctgttgggtttttttcttcttaaggaaaacgttgtcacttttatgttataaacttgaatttataaagtgctggtaaa

SEQ ID NO: 44 - DNA, 1957 bp, Homo sapien
ggtccaggcggcgcgcacggtatggcggcggcggcggcggcggcggcggcgcgcgcctgagaagaggggacgccagcccggtcaggcctcggcgcggcctacacgctccgctcgctcgctcgctcccgcctcccgccccgcgcccggccatggcggagccgtcgtccgcccgacgcccggtgcctctcatcgagtcggagctgtacttccttatcgcccggtacctatcggcgggcccgtgtcggagagcggcccaggtgctggtgcaggagctggagcagtaccagttgttgccgaagagattggactgggagggcaacgagcacaacaggagctacgaggagttggtcttgtccaataagcatgtggctcctgatcatcttttgcaaatctgccagcgcatcggtcctatgttggataaagaaattccacccagtatttcaagagtcacttctttacttggtgcaggaaggcagtctttgctacgtacagcaaaaggtaccttaatttgaagaagtgttctgctttgtattaatagcctaataattattataattgtgaagtaatgtaagcattgtggaagaaaggtgataatgtaactataaatcatgctgtggactataaaattctctgcatttagcatagaacattgaattttattacataagtgtttaatgggtccttctgcattaaaaagttgataaagatatagatgttaagctaaaaagcttgaatttattctgagatgttgtttgaggttttatcaatgtgagttcttaattttccattttgtagctcactcataacttcattgaatgtaattgtatgtgtctaataaactctttaaatgctagaggtatttcatttgatatttagcttctgaaagccctttgttataaagggaagtgattttctaaatttggtagcagcttgaaaacaagcaccacaaatgtaaaattgcatggttctttttttactaatttaatttttttgccaagttatgtgctagcaaaatgtttgaaattgctattctttttctgttagcttggtatatatgacttagactaagtatatgtatgtgatataatatatgtgtacatgtggctaaactgctaatgggcaaagattgttggttcttctgatgctgatatgatgccttccctttcttctttgagttatgaagaaactaatttctggcacagtgtgactgcttcaaacctatgttctgctgctatctcctatagaggagggcagacttttttttcttagtgcatttgctggtaggtcaaggagggatggactttgaattagtgttcagagtcacagatcctacgtatgtgctcttcagtagaggattttctgtgatcctacaatgaagggaaagctatataatttattggtacttcctaaagatagagactaaagtcatggtagtattggccaaattaattttaaaactgaacaagtcatgaattttcatataaatcaaagaactttttccttataaaagcttccatttttgaaaagttggatcagttgtaagacctttcatctttagtattgtatgatataattctacattgaaaaataaacacttggcattaaatgggacttggagtcaaaagatctggttttatggtccatctttaccaatcatttgctgtggatctctttaaaggtcctggaacctttgagcctcagttacctcacttgtaaattggcaaaaatacctacctcacagggttgttgtgaggattcaatgagctaatgtatgttgaaagcactttgtgaattgtaaagtgctacacaaatgttagttgttgttgctgctgtatctgagatgtcttaattttctttttcttcagaaatagtctaataaacctccagggcttttctgttaaagtatactagttggtaaaatgttgaataaacagtttattacaatataaaaaaaaat

SEQ ID NO: 45 - DNA, 6498 bp, Homo sapien
ggtccaggcggcgcgcacggtatggcggcggcggcggcggcggcggcggcgcgcgcctgagaagaggggacgccagcccggtcaggcctcggcgcggcctacacgctccgctcgctcgctcgctcccgcctcccgccccgcgcccggccatggcggagccgtcgtccgcccgacgcccggtgcctctcatcgagtcggagctgtacttccttatcgcccggtacctatcggcgggcccgtgtcggagagcggcccaggtgctggtgcaggagctggagcagtaccagttgttgccgaagagattggactgggagggcaacgagcacaacaggagctacgaggagttggtcttgtccaataagcatgtggctcctgatcatcttttgcaaatctgccagcgcatcggtcctatgttggataaagaaattccacccagtatttcaagagtcacttctttacttggtgcaggaaggcagtctttgctacgtacagcaaaagactgcaggcacacagtttggaagggctctgcctttgctgctcttcatagaggaagacctcctgaaatgccagtgaattatggttccccaccaaatcttgtggagatacatcgaggaaaacaactcacagggtgttccacttttagtacagcatttccaggaactatgtatcagcatataaaaatgcacagaaggattctcggacatctatctgctgtttactgtgtagcatttgataggacaggacatagaatctttacaggttcagatgactgtttggtaaagatttggtcaacacataatggccgcttgttatctacattaagaggtcattctgcagaaatttcagatatggcagtaaactatgagaatacaatgattgctgcggggagctgtgataaaattattagagtgtggtgcttgagaacttgtgccccagttgctgtgctccaaggacacacaggatcaattacatctttacagtttagcccgatggccaaaggctctcaaagatacatggtttccactggtgctgatgggacagtttgcttttggcaatgggatttagaatccttaaaatttagcccacgtcccctgaagttcactgaaaagcctaggccaggcgttcaaatgctttgttcttcttttagtgttggtggtatgtttttagccacaggtagtactgatcatgtaatcagaatgtattttttgggttttgaagcacccgaaaaaatcgcagaacttgaaagccacactgataaagtagatagtatccaattttgtaacaatggtgatcggttcctaagtggtagcagagatggaacagcacggatttggagatttgagcagttagaatggaggagcattttattggatatggctaccagaatctcaggggacttatcttccgaagaggaaaggtttatgaaacctaaagtaacaatgatagcttggaatcaaaatgatagcattgttgtcacagctgtgaatgatcatgtcctcaaagtgtggaattcttacactggacaactgcttcataacttaatggtaggtaatttctggtacaatgtaacaaatgagattttttgaaatatgattgtaattttgaagctataaaaataatatattgaacaagttgtttctctcatgtaaactatgaaatgattagaaatttttataattataaattattgtcgaatacatttctaaaagtatatgctgtaacagtatgtatttttaaattttcaatttgtaacttgtaaaccctccttaatgttatgactttgttaaataaagggacatgctgatgaagtatttgttctggagacacatccctttgattccagaattatgttatctgcaggacatgatggcagcatatttatatgggatattacaaaaggtaccaagatgaaacattattttaatatgattgaaggacaaggacatggagctgtgtttgactgtaagttttcacaggatggacagcattttgcctgtacagattctcatgggcaccttctgatatttggttttggatgcagcaaaccatatgaaaagattcctgatcagatgttcttccatactgactatcgaccacttattagagattctaataattatgtcttagatgagcaaactcagcaggctcctcatcttatgcctccaccattcttggtagatgtagatggaaatcctcatccaaccaagtatcagagattagtaccaggccgagaaaattctgcagatgaacatttgattccacagctgggctatgtggcaacaagtgatggagaggtgattgaacaaattataagcctgcaaaccaatgataatgatgaacgcagcccagaatcgagtattcttgatggaatgataagacagttgcagcagcagcaagatcagagaatgggagcagatcaggatactattccaagaggactttcaaatggtgaagaaacaccccggagaggttttagaaggctgagcttagacattcagtcccctccaaatattggtctgcgtcgtagtggacaagttgaaggtgttcgtcagatgcatcaaaacgctccacgcagtcagattgctacagaacgtgacctgcaggcttggaaacgaagagtggttgtaccagaggtaccactaggcatatttaggaagctggaagacttccgattagagaaaggtgaagaggaaagaaatctttatataataggaagaaaaagaaagactcttcagctctcacataagtcggattcagtggttttggtatcacagtctagacaaaggacatgtaggcgtaaatatccaaattatggtagaagaaatcgtagctggcgtgagttatcttctggaaatgagtcttcaagctctgtaagacatgagacttcctgtgatcagagtgaaggttctggttcttcagaagaggatgaatggagaagtgacagaaaaagtgagagttacagcgaaagttcaagtgactcttcatctagatattccgattggacagctgatgcgggcatcaatttgcagcctcctttaagaacatcatgtcgtcgacgaattactcgattttgtagtagttcagaagatgaaatatctactgagaatttatctcctccaaaaagaagacgaaagagaaagaaagaaaataagcctaagaaggagaatttgcggaggatgactccagcagagcttgcaaatatggagcatttatatgaatttcaccctccagtttggattactgacaccacacttagaaaatctccttttgttcctcaaatgggtgatgaggtaatatattttcgacagggtcatgaagcttatattgaggctgtaagaagaaataatatttatgaactgaaccctaataaggagccatggagaaaaatggatcttaggtatcagagaagcagacactggggggaaggttgactatggcaaatccatttgatggatactccatccaggatcaagaattggttaaaatagttggaatacgatatgaagttgggccccctacactctgttgcctaaaactagcatttatagatccagcaactggaaaacttatggacaaatctttctctattagatatcatgatatgccagatgttattgactttcttgtattgcgtcaattttatgatgaagcaagacagaggaattggcagtcttgtgacagattccgctctattattgatgatgcttggtggtttggaacagtgttaagtcaagagccatatcaaccacagtatcctgatagtcatttccagtgttatattgttaggtgggataatactgaaattgaaaaacttagcccatgggacatggaaccaattcctgataatgttgatccacctgaagaattaggagctagtatttctgtcacaacagatgagctagagaaattgctctataaaccacaagctggtgaatggggtcagaaatcaagagatgaagaatgtgatagaattatcagtggtatagatcaacttttgaatcttgatatagcagcagcttttgcaggccctgttgatttgtgtacatacccgaagtactgtactgtagtagcttatccaaccgatctttacacaattcgaatgagacttgttaatcgattttacaggaggctgtctgcgttagtttgggaagtcagatatatagaacataatgccagaacatttaacgaacctgagagtgtaattgcaagatcagctaaaaagataactgaccaacttttaaaatttatcaagaatcaacactgtacaaatatctcagaactttctaacacatctgaaaatgatgagcaaaatgctgaggatttggatgatagtgatcttcctaaaacatcttctggaagaaggagagtccatgatgggaaaaaaagcatcagagctacgaactatgttgaaagcaactggaagaaacagtgtaaggaactagtgaacttaatttttcagtgtgaagattctgaaccatttagacaacctgttgatttggttgaatatccagactacagagatattatagataccccaatggattttggaacagtaagggaaactctagatgcgggaaattatgacagccctttggagttttgcaaagacatccggctgatatttagcaatgcaaaagcgtatacaccaaacaaaagatcaaagatttatagtatgaccttgagattatctgccttatttgaagaaaaaatgaagaaaatctcttctgattttaaaattggtcaaaaattcaatgaaaaacttcgaagaagccagaggttcaagcaacggcaaaattgtaaaggtgacagtcagcctaacaaaagtatcagaaacctcaagccgaagaggttaaaatctcagacaaaaataattcctgagttggtaggttctcctacccagtctacctcaagtaggacagcttatcttggaacccacaagacaagtgctggtatctcttcaggtgttacttctggtgactcttcagattcagcagaatcatcagaaaggaggaaaagaaatagacctataacaaatggttctacattatctgaaagtgaagtggaagattctttagctacctctttgtcatcgtcagcttccagtagttctgaggaaagcaaagagagttccagagctcgtgaatcctcctcacgcagtgggctatccagaagcagcaatctcagggtaaccagaactagagctgctcaaagaaaaactggtcccgtttcattagcaaatggatgtggcagaaaagccactcgaaagagagtctatttaagtgattctgataacaattcattggagactggtgaaattctaaaagccagagctggaaataaccgaaaagtcttaaggaagtgtgctgctgtggctgccaataaaataaagctaatgagtgatgtagaagagaattctagctctgaaagtgtctgttctggtcggaagctgcctcaccgcaatgcttctgctgtagctagaaaaaagttattacataattctgaagatgaacagagcttaaagtcagaaattgaagaagaggagctaaaagatgaaaatcaacyattaccagtgtccagttctcacactgcccagagcaatgttgatgaatctgaaaacagagactcagagtcagaaagtgatttgcgggtagcccggaaaaattggcatgctaatggttacaagtcccatactccagcaccttcaaagacaaaatttcttaaaatagagtcttctgaggaagactctaaaagtcatgattcagatcatgcatgtaacagaactgctggcccatcaacgtctgtgcagaaacttaaggcagagagcatctcagaggaagcagattctgaaccaggaagatctggtggtaggaaatacaatacatttcacaagaatgcgagtttctttaaaaaaaccaagattctgagtgactcagaagactctgaatctgaagagcaagatagagaagatgggaaatgtcataaaatggaaatgaacccaatttcaggaaatctgaactgtgaccctattgctatgtcccagtgttcctcagatcatggatgtgaaactgatttagattcagatgatgacaaaatagaaaaaccaaacaattttatgaaaggtaattcaaaacatttatctttgttcactgattgactctcaccatccttttctcttacacacattggttttttccccccgaaaaagtttcccttgaaacttttttctctttgctgtttctctccctcccatgcattctgtgttagccttctctgttcatcctttatattcttatgtgcatgcgtaactttttattgagtataattttattcacctaacaggcaatcttggccttaagaactatgcctattgaagatttcacttcttgtattgatgatggggatatattatattagagatgggcttgaataaagcagagaggggcacatttataagctgtgatgttgatagcttaagtagtagacaaaaagggtaggaca

SEQ ID NO: 46 - DNA, 4338 bp, Homo sapien
ggtccaggcggcgcgcacggtatggcggcggcggcggcggcggcggcggcgcgcgcctgagaagaggggacgccagcccggtcaggcctcggcgcggcctacacgctccgctcgctcgctcgctcccgcctcccgccccgcgcccggccatggcggagccgtcgtccgcccgacgcccggtgcctctcatcgagtcggagctgtacttccttatcgcccggtacctatcggcgggcccgtgtcggagagcggcccaggtgctggtgcaggagctggagcagtaccagttgttgccgaagagattggactgggagggcaacgagcacaacaggagctacgaggagttggtcttgtccaataagcatgtggctcctgatcatcttttgcaaatctgccagcgcatcggtcctatgttggataaagaaattccacccagtatttcaagagtcacttctttacttggtgcaggaaggcagtctttgctacgtacagcaaaagactgcaggcacacagtttggaagggctctgcctttgctgctcttcatagaggaagacctcctgaaatgccagtgaattatggttccccaccaaatcttgtggagatacatcgaggaaaacaactcacagggtgttccacttttagtacagcatttccaggaactatgtatcagcatataaaaatgcacagaaggattctcggacatctatctgctgtttactgtgtagcatttgataggacaggacatagaatctttacaggttcagatgactgtttggtaaagatttggtcaacacataatggccgcttgttatctacattaagaggtcattctgcagaaatttcagatatggcagtaaactatgagaatacaatgattgctgcggggagctgtgataaaattattagagtgtggtgcttgagaacttgtgccccagttgctgtgctccaaggacacacaggatcaattacatctttacagtttagcccgatggccaaaggctctcaaagatacatggtttccactggtgctgatgggacagtttgcttttggcaatgggatttagaatccttaaaatttagcccacgtcccctgaagttcactgaaaagcctaggccaggcgttcaaatgctttgttcttcttttagtgttggtggtatgtttttagccacaggtagtactgatcatgtaatcagaatgtattttttgggttttgaagcacccgaaaaaatcgcagaacttgaaagccacactgataaagtagatagtatccaattttgtaacaatggtgatcggttcctaagtggtagcagagatggaacagcacggatttggagatttgagcagttagaatggaggagcattttattggatatggctaccagaatctcaggggacttatcttccgaagaggaaaggtttatgaaacctaaagtaacaatgatagcttggaatcaaaatgatagcattgttgtcacagctgtgaatgatcatgtcctcaaagtgtggaattcttacactggacaactgcttcataacttaatggtaggtaatttctggtacaatgtaacaaatgagattttttgaaatatgattgtaattttgaagctataaaaataatatattgaacaagttgtttctctcatgtaaactatgaaatgattagaaatttttataattataaattattgtcgaatacatttctaaaagtatatgctgtaacagtatgtatttttaaattttcaatttgtaacttgtaaaccctccttaatgttatgactttgttaaataaagggacatgctgatgaagtatttgttctggagacacatccctttgattccagaattatgttatctgcaggacatgatggcagcatatttatatgggatattacaaaaggtaccaagatgaaacattattttaatatgattgaaggacaaggacatggagctgtgtttgactgtaagttttcacaggatggacagcattttgcctgtacagattctcatgggcaccttctgatatttggttttggatgcagcaaaccatatgaaaagattcctgatcagatgttcttccatactgactatcgaccacttattagagattctaataattatgtcttagatgagcaaactcagcaggctcctcatcttatgcctccaccattcttggtagatgtagatggaaatcctcatccaaccaagtatcagagattagtaccaggccgagaaaattctgcagatgaacatttgattccacagctgggctatgtggcaacaagtgatggagaggtgattgaacaaattataagcctgcaaaccaatgataatgatgaacgcagcccagaatcgagtattcttgatggaatgataagacagttgcagcagcagcaagatcagagaatgggagcagatcaggatactattccaagaggactttcaaatggtgaagaaacaccccggagaggttttagaaggctgagcttagacattcagtcccctccaaatattggtctgcgtcgtagtggacaagttgaaggtgttcgtcagatgcatcaaaacgctccacgcagtcagattgctacagaacgtgacctgcaggcttggaaacgaagagtggttgtaccagaggtaccactaggcatatttaggaagctggaagacttccgattagagaaaggtgaagaggaaagaaatctttatataataggaagaaaaagaaagactcttcagctctcacataagtcggattcagtggttttggtatcacagtctagacaaaggacatgtaggcgtaaatatccaaattatggtagaagaaatcgtagctggcgtgagttatcttctggaaatgagtcttcaagctctgtaagacatgagacttcctgtgatcagagtgaaggttctggttcttcagaagaggatgaatggagaagtgacagaaaaagtgagagttacagcgaaagttcaagtgactcttcatctagatattccgattggacagctgatgcgggcatcaatttgcagcctcctttaagaacatcatgtcgtcgacgaattactcgattttgtagtagttcagaagatgaaatatctactgagaatttatctcctccaaaaagaagacgaaagagaaagaaagaaaataagcctaagaaggagaatttgcggaggatgactccagcagagcttgcaaatatggagcatttatatgaatttcaccctccagtttggattactgacaccacacttagaaaatctccttttgttcctcaaatgggtgatgaggtaatatattttcgacagggtcatgaagcttatattgaggctgtaagaagaaataatatttatgaactgaaccctaataaggagccatggagaaaaatggatcttaggtatcagagaagcagacactggggggaaggttgactatggcaaatccatttgatggatactccatccaggatcaagaattggttaaaatagttggaatacgatatgaagttgggccccctacactctgttgcctaaaactagcatttatagatccagcaactggaaaacttatggacaaatctttctctattagatatcatgatatgccagatgttattgactttcttgtattgcgtcaattttatgatgaagcaagacagaggaattggcagtcttgtgacagattccgctctattattgatgatgcttggtggtttggaacagtgttaagtcaagagccatatcaaccacagtatcctgatagtcatttccagtgttatattgttaggtgggataatactgaaattgaaaaacttagcccatgggacatggaaccaattcctgataatgttgatccacctgaagaattaggagctagtatttctgtcacaacagatgagctagagaaattgctctataaaccacaagctggtgaatggggtcagaaatcaagagatgaagaatgtgatagaattatcagtggtatagatcaacttttgaatcttgatatagcagcagcttttgcaggccctgttgatttgtgtacatacccgaagtactgtactgtagtagcttatccaaccgatctttacacaattcgaatgagacttgttaatcgattttacaggaggctgtctgcgttagtttgggaagtcagatatatagaacataatgccagaacatttaacgaacctgagagtgtaattgcaagatcagctaaaaagataactgaccaacttttaaaatttatcaagtaagtaatttcatagatgttgtgtaaaagtgactgcatattgtgctattaacaatcatctagtttgccgggcgtggtggctcatgc

SEQ ID NO: 47 - DNA, 3553 bp, Homo sapien
ggtccaggcggcgcgcacggtatggcggcggcggcggcggcggcggcggcgcgcgcctgagaagaggggacgccagcccggtcaggcctcggcgcggcctacacgctccgctcgctcgctcgctcccgcctcccgccccgcgcccggccatggcggagccgtcgtccgcccgacgcccggtgcctctcatcgagtcggagctgtacttccttatcgcccggtacctatcggcgggcccgtgtcggagagcggcccaggtgctggtgcaggagctggagcagtaccagttgttgccgaagagattggactgggagggcaacgagcacaacaggagctacgaggagttggtcttgtccaataagcatgtggctcctgatcatcttttgcaaatctgccagcgcatcggtcctatgttggataaagaaattccacccagtatttcaagagtcacttctttacttggtgcaggaaggcagtctttgctacgtacagcaaaagactgcaggcacacagtttggaagggctctgcctttgctgctcttcatagaggaagacctcctgaaatgccagtgaattatggttccccaccaaatcttgtggagatacatcgaggaaaacaactcacagggtgttccacttttagtacagcatttccaggaactatgtatcagcatataaaaatgcacagaaggattctcggacatctatctgctgtttactgtgtagcatttgataggacaggacatagaatctttacaggttcagatgactgtttggtaaagatttggtcaacacataatggccgcttgttatctacattaagaggtcattctgcagaaatttcagatatggcagtaaactatgagaatacaatgattgctgcggggagctgtgataaaattattagagtgtggtgcttgagaacttgtgccccagttgctgtgctccaaggacacacaggatcaattacatctttacagtttagcccgatggccaaaggctctcaaagatacatggtttccactggtgctgatgggacagtttgcttttggcaatgggatttagaatccttaaaatttagcccacgtcccctgaagttcactgaaaagcctaggccaggcgttcaaatgctttgttcttcttttagtgttggtggtatgtttttagccacaggtagtactgatcatgtaatcagaatgtattttttgggttttgaagcacccgaaaaaatcgcagaacttgaaagccacactgataaagtagatagtatccaattttgtaacaatggtgatcggttcctaagtggtagcagagatggaacagcacggatttggagatttgagcagttagaatggaggagcattttattggatatggctaccagaatctcaggggacttatcttccgaagaggaaaggtttatgaaacctaaagtaacaatgatagcttggaatcaaaatgatagcattgttgtcacagctgtgaatgatcatgtcctcaaagtgtggaattcttacactggacaactgcttcataacttaatggtaggtaatttctggtacaatgtaacaaatgagattttttgaaatatgattgtaattttgaagctataaaaataatatattgaacaagttgtttctctcatgtaaactatgaaatgattagaaatttttataattataaattattgtcgaatacatttctaaaagtatatgctgtaacagtatgtatttttaaattttcaatttgtaacttgtaaaccctccttaatgttatgactttgttaaataaagggacatgctgatgaagtatttgttctggagacacatccctttgattccagaattatgttatctgcaggacatgatggcagcatatttatatgggatattacaaaaggtaccaagatgaaacattattttaatatgattgaaggacaaggacatggagctgtgtttgactgtaagttttcacaggatggacagcattttgcctgtacagattctcatgggcaccttctgatatttggttttggatgcagcaaaccatatgaaaagattcctgatcagatgttcttccatactgactatcgaccacttattagagattctaataattatgtcttagatgagcaaactcagcaggctcctcatcttatgcctccaccattcttggtagatgtagatggaaatcctcatccaaccaagtatcagagattagtaccaggccgagaaaattctgcagatgaacatttgattccacagctgggctatgtggcaacaagtgatggagaggtgattgaacaaattataagcctgcaaaccaatgataatgatgaacgcagcccagaatcgagtattcttgatggaatgataagacagttgcagcagcagcaagatcagagaatgggagcagatcaggatactattccaagaggactttcaaatggtgaagaaacaccccggagaggttttagaaggctgagcttagacattcagtcccctccaaatattggtctgcgtcgtagtggacaagttgaaggtgttcgtcagatgcatcaaaacgctccacgcagtcagattgctacagaacgtgacctgcaggcttggaaacgaagagtggttgtaccagaggtaccactaggcatatttaggaagctggaagacttccgattagagaaaggtgaagaggaaagaaatctttatataataggaagaaaaagaaagactcttcagctctcacataaggtaacctaaattctgttttcttagcaaattagaaattacattgaaatatagagttttctttttgatttataaaactatcagtaactttcatctgaagtggagtatttcttgcttaaggttttctgtttgagatttaaaatagtagacttaaggttatatagctgttagaaaggagtagtttgaaaacttgagaaaaattgcctagtgcctaacaatggtattgagttcttaattttagttactaaattatttgattctgaattgtcatttggttcttctttttttttttaaagggctctcagttttctactaaaattctcattgttttaattacttggaaagcagccatagctattttaaaaacaggtctggtaatttcatttttttcaatgtcttgcttccctgtggaccattttctattgcctgttgatttttctccttttttatcatcatatttttgtttcttttttgattgttaaatgttagaaaagatttgaagcacaggatggctttattcccagagacgatttacattgacttctggcagccttctggggccactctcaagccttattgccttatccgaacaagaatgggccttagttccttgggattactgttctatctgtagtttacctacaggtctaggctgtagccttttgggctaacagccaaagcccgagggagtcccctacatataggaggccatgaattgcaagtttattagcctaactcatgagttagtctgtgattttgcttacttgctaaaccttccagcttcctcttccagaatgaaattctagggt

SEQ ID NO: 48 - DNA, 2388 bp, Homo sapien
ggtccaggcggcgcgcacggtatggcggcggcggcggcggcggcggcggcgcgcgcctgagaagaggggacgccagcccggtcaggcctcggcgcggcctacacgctccgctcgctcgctcgctcccgcctcccgccccgcgcccggccatggcggagccgtcgtccgcccgacgcccggtgcctctcatcgagtcggagctgtacttccttatcgcccggtacctatcggcgggcccgtgtcggagagcggcccaggtgctggtgcaggagctggagcagtaccagttgttgccgaagagattggactgggagggcaacgagcacaacaggagctacgaggagttggtcttgtccaataagcatgtggctcctgatcatcttttgcaaatctgccagcgcatcggtcctatgttggataaagaaattccacccagtatttcaagagtcacttctttacttggtgcaggaaggcagtctttgctacgtacagcaaaagactgcaggcacacagtttggaagggctctgcctttgctgctcttcatagaggaagacctcctgaaatgccagtgaattatggttccccaccaaatcttgtggagatacatcgaggaaaacaactcacagggtgttccacttttagtacagcatttccaggaactatgtatcagcatataaaaatgcacagaaggattctcggacatctatctgctgtttactgtgtagcatttgataggacaggacatagaatctttacaggttcagatgactgtttggtaaagatttggtcaacacataatggccgcttgttatctacattaagaggtcattctgcagaaatttcagatatggcagtaaactatgagaatacaatgattgctgcggggagctgtgataaaattattagagtgtggtgcttgagaacttgtgccccagttgctgtgctccaaggacacacaggatcaattacatctttacagtttagcccgatggccaaaggctctcaaagatacatggtttccactggtgctgatgggacagtttgcttttggcaatgggatttagaatccttaaaatttagcccacgtcccctgaagttcactgaaaagcctaggccaggcgttcaaatgctttgttcttcttttagtgttggtggtatgtttttagccacaggtagtactgatcatgtaatcagaatgtattttttgggttttgaagcacccgaaaaaatcgcagaacttgaaagccacactgataaagtagatagtatccaattttgtaacaatggtgatcggttcctaagtggtagcagagatggaacagcacggatttggagatttgagcagttagaatggaggagcattttattggatatggctaccagaatctcaggggacttatcttccgaagaggaaaggtttatgaaacctaaagtaacaatgatagcttggaatcaaaatgatagcattgttgtcacagctgtgaatgatcatgtcctcaaagtgtggaattcttacactggacaactgcttcataacttaatggtaggtaatttctggtacaatgtaacaaatgagattttttgaaatatgattgtaattttgaagctataaaaataatatattgaacaagttgtttctctcatgtaaactatgaaatgattagaaatttttataattataaattattgtcgaatacatttctaaaagtatatgctgtaacagtatgtatttttaaattttcaatttgtaacttgtaaaccctccttaatgttatgactttgttaaataaagggacatgctgatgaagtatttgttctggagacacatccctttgattccagaattatgttatctgcaggacatgatggcagcatatttatatgggatattacaaaaggtaccaagatgaaacattattttaatatgattgaaggacaaggacatggagctgtgtttgactgtaagttttcacaggatggacagcattttgcctgtacagattctcatgggcaccttctgatatttggttttggatgcagcaaaccatatgaaaagattcctgatcagatgttcttccatactgactatcgaccacttattagagattctaataattatgtcttagatgagcaaactcagcaggctcctcatcttatgcctccaccattcttggtagatgtagatggaaatcctcatccaaccaagtatcagagattagtaccaggccgagaaaattctgcagatgaacatttgattccacagctgggctatgtggcaacaagtgatggagaggtgattgaacaaattataagcctgcaaaccaatcatggaccacagcactggtctggaccgttactctgcacatggaccagaaaaagtatatggg

SEQ ID NO: 49 - DNA, 5729 bp, Homo sapien
  misc_feature (305)..(305): n=a, c, g or t
  misc_feature (313)..(313): n=a, c, g or t
aacttctattttttcttgataattctgtaggcaaaaaaattggggaaggcaaattacaatcattcttcttctgtaatactttgggacaatttttaaacaactcagacccatgtttaaaaacgagttttgtgtgattaacccttgtatagtatccagttactgtcttctcttgaagtggtggttctttgagaagtagaattattttgtaacttttcttctcccagaaacagaagaatcaaatactattctgttaggattctatctagacctgtgactcttagtataataacccttttattattatnattatttnttttttttcagtaatctataaagtagagttgcttagttttgagcaatttagggcttttcttattggccagtaggttattcattttgctgctaaatataattttttggttaattttaacattatagtgctggccgcttggttctatgattacctaaaaatctagtttttttcctccataggtagatgtgtgtgtatgcatacccccacacacacacgtacatatatgttgtcatagagaggtatttcaacccttatttcaaataacagtagaagatacgaaccatgaatttatattttgtaaaaatgtcattcatccactttgttttccattggaaatagttttataagaagggttccccttgctctctccacttaacaatttcattatatacgtagaaaaagcagccgacttaagggcttgatgttttttcaggccttgtggattcaggtttccagtttcccagtgcccttaatggatgttatgaatgcataagcacattttcttttaaagaaagaagttagatttatagtgttatttcttacttgctatatttctttgcactaaaaaagagctatgtgtttgttttataggacactttagtaccgtattgcctacaataactcagtttgctccttaaattccaaactctgggaagttgataaataacttccatgatcacttgtaaaagttacatgcacatctgaaaaaaaatcacaaatctctatgacagtaggttatgttttgagcttgttaccttgcagtattcttctctgttccataggtgaaaacaaagggtgacagaggttatcaggcaggaaatgcctaaatacatacatctctgcatggtacaatttctcatattcatgtattccataaacagtgttttttctctgtttaagcagactgttgtttcttctgagtcagtgatatgtgatcttcgttggtttcattttgtgaagctcagtctgtctctgtaacatactttaggatttgcaccttgtgctccccaggaattatgttagtgtccttttctatgctgtcttcaaggatggacagaggcctaaaccacaacaacaacaaaaattaggaaaaaaatacttagatttcggtaatcatccataggaactcatagcatcagtctcttttctctgtgaataatatctttgtgtaagttgtcataaaaaatcaacgttagaagatgacaattagaattcttcttaggtattgagggtaagaagttgtaaagaaagaaaattcgtgtttcaactaaaagattggattgcatatacctttgaagtggttttgtaaaaaaagttcagttactaaactgagtgtgccctgtaatccttttgagtgcactgaagatgctttgaaaatactttgttggtcttcacattgtgcatcatgtcctgcaacttgtaaatatgtgcatgttgtttatgtttgtctgcctgtctcttattgcactaaattctgcaaggtgaataatttttttataccatttatttggaaaaagttcctcctccaactcttcttcactgaccttttaattagttggtaaacttagaaaaccaggtaggatttttgaagccctgagtttaaaagaagaatcgtggctatttgacatcatccttacattcccctgacttaaaaagctaacaagaagcacgagatcttccacctcattttagaaagcttttctacagaactatatgcttgcttatagctacctatctacagtttgaacagggagaaagggagatatgtatgtctggttacatcttccttcactcttgaattggctgggacagcaagcaacaacagtttgaggtccagtgacctacgtaaaatgagtgtcgtttgtgtcaggggacacatgtaactgtgcaacatggtattttctacagggagggctaggaagggtggttttggaacctaacctactttgtgtcttcattgtcagaactaaggttggaaatgccctttaaagaacttggtgaggcatatgctaggacaatagagctgctttagaaagaaattgagacatgttttgtcaggacagataaaagtttaatgcaggcttttgaacagatgttttaaaacaaatttgaccttaccaactatttttttcttctagccaaatcattgtacaggagtttcatatatgataaaaagtgttttgttattgtttttgctttcttggcaggggagaacccctaccattgtgagcagttactgtcactctggctgaatggacaaatagctgtgtaaatagcttctcataaaacgcttctactgatagctgtttgactttttcttcccgttatgaatgggaggaacatttgtaaacttcctttctgggtagctaccaaaaaacgtactggcttatggtcccatgtgaccttgtctccgttaagcccagaatctgagtgcctttagcaagtgttagcatttcacagagagaagagagacagaattattgctattaatcaccattcataaataggagcttggaataacaaaggtctgtgtgaattctgttctacgtcttttttttcccttttttaaataaatgtcaatttgatatcaagtaaaactattgtcattattgatcagaaaccatacattctgaaaatgaatccagttttcccaagctggcagaagtcagagatcatttttcaccttgatctgtgttgcgtttgtacttagtgaatggcagtgtggttgattggaagagcttgacactgatgtttggaaaaattctttattctagtggtcattttcaaacttgtcttctgtagagaggggaaaaattatgtatttgcagctaaagcgaagagactggcacaataattattaattgtgttagttcatttctatattaaatgaagcatcttcacaaatcaggtttgaagccattaaaagcaaaattttccctagtttaattaatttaaaattctaaattgcctgactacttagaatcttagaaacgccctgctagactgattttattatagaaatgttaacatgttcctcaacattttctcaagaaaattttcagacatatatcaaagttgaaaaaactttgcagtataaccactgctagattctgccatcaacatttgactatacttgtattgccatgtatctgttcatattctctatccctcttttcatccatcgatccatcagattttttttttaaagaacattccaaagtaaattttaggcaatacactgccctaaattcttagcatgggtgtcattaattaaggtttagtattcgtttaaatatctattttgaaagtggtgtatgaagttgataatctgagccaattaacatactttttttttttttcctcctgtggacttttgtcttccagtttctctttttgtgtgtacttagggtgagggaggacaattcctttcaaacacaagtttattttagaattggtcatttttaagtgcttgtcataaattttaaagtttcaatataatttttcttttccccacttctgataatgtatttttgccaaactatgcagcttcttcaaaaaactgtaaattactgattggggtttatgaaatcagcgaatacctcatttcaatctgttgctgcttttctccctcttgtcacttctcctttcactactttcagctgctctaccagaaggtagaggggagtaaagggtcaaacccctatataattagctgttttaaacaactctaggagagcagattaagtagcttagtaagttgaaactattaatttttctaaagaatttgatttgaattccttgagaattgtaattatccacacttcctccagctataattagcagaattaaaaatgattgtactgtacaatgagttgttgaaattgtaagccttagtaaccatctttagctttattgtagtcatgtttagaaaaaattatttttacatatgcctttatttttatgcccactttttgtggataagattctttagataaaatctaaagaattttaagtgactttctccaggtcatgaagattcaatgggtagaattgaatcagaattgaaatgttccagattcatattcttgtgtgtgtttgataaaattcatggcttccaaagtaactgaacacttcctttgggcccttggagggaaaatccatatttttactaattacacttttttttttagacatctggcagttctttgaacttaaacatattctcatggccatagttccaaattaagcccgacgcagttgctaaaaatcttgctgcactgttgaatactaataatgcaacatttattggatgtttttgcattttgatgaccttcatgattcatttataagtctttgtaagtgcttaagtgaccccctcactagtgaaaataataaatgttctatatcatttattattatttgtgtattctctacatgatatatttttttaaggaagagtaactccacatgtcagaatgagtgatattatcctagggcaaagcgcaaatagggcagtttgtttctactctgcaaatatggcatgtataggaacaaaactcttttggagtggctggtcattgttttgccctcttttggtacctgagtacctttctggggttttgtaaatcgtgtgtcatttgtaagaatttcacgttaactctgcgttacttggtgttcacctgtggtatccttgactgaccataatgatttagtttgggtatgatgtgtctgctttgaaatgccttactggagtatgtcagatcctgctttaaagcattccatatatctgctgggacaataagttgcttctccttggaaatatgctctagattcagaagcaaaaccgattttgctttcaccattaaggttgcattttaatgcagttattgttttaaattagagaataaaatgtaaaaccaagggaggctttagaaccctttattgaatggcatggcaaacttttaaaactgcttttgctatttcactagaactatctttgataaaggatatagctaaaaaatgtcagcccaaactgtgtgtaattagggttgtttattaaaattttctctaaatgtcatacagaggcttaagatctgtgtatgctgttgggtcggagtgccagtcactgctttggaagtctgtgttctggggctgcagaatgacaaacgtgtcatgggattaaaaccaatcaactgtgaattgtgaaattgaaactactctttcggttttattttctttagcatattgagtatagaaatctgaaacttatttaaaatttatactgcttttgttgatggctcattttggctgtgtatcctcacttatgtactgatttctgataaaggcttgacattattataacacgcattttgtgttccagtttaataaaacggtttctgagtcttgtctgaaaaaa

SEQ ID NO: 50 - DNA, 5909 bp, Homo sapien
  misc_feature (27)..(27): n=a, c, g or t
  misc_feature (60)..(60): n=a, c, g or t
  misc_feature (100)..(100): n=a, c, g or t
  misc_feature (102)..(102): n=a, c, g or t
  misc_feature (109)..(109): n=a, c, g or t
  misc_feature (131)..(131): n=a, c, g or t
  misc_feature (150)..(150): n=a, c, g or t
  misc_feature (158)..(159): n=a, c, g or t
ttaactacattttatctatttactatnttttatatgggtaagaccagtggtcatcccgtntttcttttgaaagcccacttttgggaatttccaagggggnangtttatnttttaagcagtatgcttgcacntggtcaagttcacatttgnttgcttgnnttactaattagaggtaaaacttctattttttcttgataattctgtaggcaaaaaaaattggggaaggcaaattacaatcattcttcttctgtaatactttgggacaatttttaaacaactcagacccatgtttaaaaacgagttttgtgtgattaacccttgtatagtatccagttactgtcttctcttgaagtggtggttctttgagaagtagaattattttgtaacttttcttctcccagaaacagaagaatcaaatactattctgttaggattctatctagacctgtgactcttagtataataacccttttattattattattattttttttttttcagtaatctataaagtagagttgcttagttttgagcaatttagggcttttcttattggccagtaggttattcattttgctgctaaatataattttttggttaattttaacattatagtgctggccgctgggttctatgattacctaaaaatctagtttttttcctccataggtagatgtgtgtgtatgcatacccccacacacacacgtacatatatgttgtcatagagaggtatttcaacccttatttcaaataacagtagaagatacgaacatgaatttatattttgtaaaaatgtcattcatccactttgttttccattggaaatagttttataagaagggttccccttgctctctccacttaacaatttcattatatacgtagaaaaagcagccgacttaagggcttgatgttttttcaggccttgtggattcaggtttccagtttcccagtgcccttaatggatgttatgaatgcataagcacattttcttttaaagaaagaagttagatttatagtgttatttcttacttgctatatttctttgcactaaaaaagagctatgtgtttgttttataggacactttagtaccgtattgcctacaataactcagtttgctccttaaattccaaactctgggaagttgataaataacttccatgatcacttgtaaaagttacatgcacatctgaaaaaaaatcacaaatctctatgacagtaggttatgttttgagcttgttaccttgcagtattcttctctgttccataggtgaaaacaaagggtgacagaggttatcaggcaggaaatgcctaaatagatacatctctgcatggtacaatttctcatattcatgtattccataaacagtgttttttctctgtttaagcagactgttgtttcttctgagtcagtgatatgtgatcttcgttggtttcattttgtgaagctcagtctgtctctgtaacatactttaggatttgcaccttgtgctccccaggaattatgttagtgtccttttctatgctgtcttcaaggatggacagaggcctaaaccacaacaacaacaaaaattagaaaaaaaaatacttagatttcggtaatcatccataggaactcatagcatcagtctcttttctctgtgaataatatctttgtgtaagttgtcataaaaaatcaacgttagaagatgacaattagaattcttcttaggtattgagggtaagaagttgtaaagaaagaaaattcgtgtttcaactaaaagattggattgcatatacctttgaagtggttttgtaaaaaaagttcagttactaaactgagtgtgccctgtaatccttttgagtgcactgaagatgctttgaaaatactttgttggtcttcacattgtgcatcatgtcctgcaacttgtaaatatgtgcatgttgtttatgtttgtctgcctgtctcttattgcactaaattctgcaaggtgaataatttttttataccatttatttggaaaaagttcctcctccaactcttcttcactgaccttttaattagttggtaaacttagaaaaccaggtaggatttttgaagccctgagtttaaaagaagaatcgtggctatttgacatcatccttacattcccctgacttaaaaagctaacaagaagcacgagatcttccacctcattttagaaagcttttctacagaactatatgcttgcttatagctacctatctacagtttgaacagggagaaagggagatatgtatgtctggttacatcttccttcactcttgaattggctgggacagcaagcaacaacagtttgaggtccagtgacctacgtaaaatgagtgtcgtttgtgtcaggggacacatgtaactgtgcaacatggtattttctacagggagggctaggaagggtggttttggaacctaacctactttgtgtcttcattgtcagaactaaggttggaaatgccctttaaagaacttggtgaggcatatgctaggacaatagagctgctttagaaagaaattgagacatgttttgtcaggacagataaaagtttaatgcaggcttttgaacagatgttttaaaacaaatttgaccttaccaactatttttttcttctagccaaatcattgtacaggagtttcatatatgataaaaagtgttttgttattgtttttgctttcttggcaggggagaacccctaccattgtgagcagttactgtcactctggctgaatggacaaatagctgtgtaaatagcttctcataaaacgcttctactgatagctgtttgactttttcttcccgttatgaatgggaggaacatttgtaaacttcctttctgggtagctaccaaaaaacgtactggcttatggtcccatgtgaccttgtctccgttaagcccagaatctgagtgcctttagcaagtgttagcatttcacagagagaagagagacagaattattgctattaatcaccattcataaataggagcttggaataacaaaggtctgtgtgaattctgttctacgtcttttttttcccttttttaaataaatgtcaatttgatatcaagtaaaactattgtcattattgatcagaaaccatacattctgaaaatgaatccagttttcccaagctggcagaagtcagagatcatttttcaccttgatctgtgttgcgtttgtacttagtgaatggcagtgtggttgattggaagagcttgacactgatgtttggaaaaattctttattctagtggtcattttcaaacttgtcttctgtagagaggggaaaaattatgtatttgcagctaaagcgaagagactggcacaataattattaattgtgttagttcatttctatattaaatgaagcatcttcacaaatcaggtttgaagccattaaaagcaaaattttccctagtttaattaatttaaaattctaaattgcctgactacttagaatcttagaaacgccctgctagactgattttattatagaaatgttaacatgttcctcaacattttctcaagaaaattttcagacatatatcaaagttgaaaaaactttgcagtataaccactgctagattctgccatcaacatttgactatacttgtattgccatgtatctgttcatattctctatccctcttttcatccatcgatccatcagattttttttttaaagaacattccaaagtaaattttaggcaatacactgccctaaattcttagcatgggtgtcattaattaaggtttagtattcgtttaaatatctattttgaaagtggtgtatgaagttgataatctgagccaattaacatacttttttttttttcctcctgtggacttttgtcttccagtttctctttttgtgtgtacttagggtgagggaggacaattcctttcaaacacaagtttattttagaattggtcatttttaagtgcttgtcataaattttaaagtttcaatataatttttcttttccccacttcagataatgtatttttgccaaactatgcagcttcttcaaaaaactgtaaattactgattggggtttatgaaatcagcgaatacctcatttcaatctgttgctgcttttctccctcttgtcacttctcctttcactactttcagctgctctaccagaaggtagaggggagtaaagggtcaaacccctatataattagctgttttaaacaactctaggagagcagattaagtagcttagtaagttgaaactattaatttttctaaagaatttgatttgaattccttgagaattgtaattatccacacttcctccagctataattagcagaattaaaaatgattgtactgtacaatgagttgttgaaattgtaagccttagtaaccatctttagctttattgtagtcatgtttagaaaaaattatttttacatatgcctttatttttatgcccactttttgtggataagattctttagataaaatctaaagaattttaagtgactttctccaggtcatgaagattcaatgggtagaattgaatcagaattgaaatgttccagattcatattcttgtgtgtgtttgataaaattcatggcttccaaagtaactgaacacttcctttgggcccttggagggaaaatccatatttttactaattacacttttttttttagacatctggcagttctttgaacttaaacatattctcatggccatagttccaaattaagcccgacgcagttgctaaaaatcttgctgcactgttgaatactaataatgcaacatttattggatgtttttgcattttgatgaccttcatgattcatttataagtctttgtaagtgcttaagtgaccccctcactagtgaaaataataaatgttctatatcatttattattatttgtgtattctctacatgatatatttttttaaggaagagtaactccacatgtcagaatgagtgatattatcctagggcaaagcgcaaatagggcagtttgtttctactctgcaaatatggcatgtataggaacaaaactcttttggagtggctggtcattgttttgccctcttttggtacctgagtacctttctggggttttgtaaatcgtgtgtcatttgtaagaatttcacgttaactctgcgttacttggtgttcacctgtggtatccttgactgaccataatgatttagtttgggtatgatgtgtctgctttgaaatgccttactggagtatgtcagatcctgctttaaagcattccatatatctgctgggacaataagttgcttctccttggaaatatgctctagattcagaagcaaaaccgattttgctttcaccattaaggttgcattttaatgcagttattgttttaaattagagaataaaatgtaaaaccaagggaggctttagaaccctttattgaatggcatggcaaacttttaaaactgcttttgctatttcactagaactatctttgataaaggatatagctaaaaaatgtcagcccaaactgtgtgtaattagggttgtttattaaaattttctctaaatgtcatacagaggcttaagatctgtgtatgctgttgggtcggagtgccagtcactgctttggaagtctgtgttctggggctgcagaatgacaaacgtgtcatgggattaaaaccaatcaactgtgaattgtgaaattgaaactactctttcggttttattttctttagcatattgagtatagaaatctgaaacttatttaaaatttatactgcttttgttgatggctcattttggctgtgtatcctcacttatgtactgatttctgataaaggcttgacattattataacacgcattttgtgttccagtttaataaaacggtttctgagtcttgtctgaaaaaaaaaa

SEQ ID NO: 51 - DNA, 5989 bp, Homo sapien
ggcacgaggtctccaaaaaaaaaaaaaaaagaagctataatatatatctagattaactaatggagtgctctgtgaatattcattaactacattttatctatttactatattttatatgggtaagaccagtggtcatccgtatttcttttgaaagcccacttgatcaggaagtttatattttaagcagtatgtttgcacaatggtcagttcacatttgattgcttgtattactaattagaggtaaaacttctattttttcttgataattctgtaggcaaaaaaaattggggaaggcaaattacaatcattcttcttctgtaatactttgggacaatttttaaacaactcagacccatgtttaaaaacgagttttgtgtgattaacccttgtatagtatccagttactgtcttctcttgaagtggtggttctttgagaagtagaattattttgtaacttttcttctcccagaaacagaagaatcaaatactattctgttaggattctatctagacctgtgactcttagtataataacccttttattattattattattttttttttttcagtaatctataaagtagagttgcttagttttgagcaatttagggcttttcttattggccagtaggttattcattttgctgctaaatataattttttggttaattttaacattatagtgctggccgcttggttctatgattacctaaaaatctagtttttttcctccataggtagatgtgtgtgtatgcatacccccacacacacacgtacatatatgttgtcatagagaggtatttcaacccttatttcaaataacagtagaagatacgaacatgaatttatattttgtaaaaatgtcattcatccactttgttttccattggaaatagttttataagaagggttccccttgctctctccacttaacaatttcattatatacgtagaaaaagcagccgacttaagggcttgatgttttttcaggccttgtggattcaggtttccagtttcccagtgcccttaatggatgttatgaatgcataagcacattttcttttaaagaaagaagttagatttatagtgttatttcttacttgctatatttctttgcactaaaaaagagctatgtgtttgttttataggacactttagtaccgtattgcctacaataactcagtttgctccttaaattccaaactctgggaagttgataaataacttccatgatcacttgtaaaagttacatgcacatctgaaaaaaaatcacaaatctctatgacagtaggttatgttttgagcttgttaccttgcagtattcttctctgttccataggtgaaaacaaagggtgacagaggttatcaggcaggaaatgcctaaatacatacatctctgcatggtacaatttctcatattcatgtattccataaacagtgttttttctctgtttaagcagactgttgtttcttctgagtcagtgatatgtgatcttcgttggtttcattttgtgaagctcagtctgtctctgtaacatactttaggatttgcaccttgtgctccccaggaattatgttagtgtccttttctatgctgtcttcaaggatggacagaggcctaaaccacaacaacaacaaaaattagaaaaaaaaatacttagatttcggtaatcatccataggaactcatagcatcagtctcttttctctgtgaataatatctttgtgtaagttgtcataaaaaatcaacgttagaagatgacaattagaattcttcttaggtattgagggtaagaagttgtaaagaaagaaaattcgtgtttcaactaaaagattggattgcatatacctttgaagtggttttgtaaaaaaagttcagttactaaactgagtgtgccctgtaatccttttgagtgcactgaagatgctttgaaaatactttgttggtcttcacattgtgcatcatgtcctgcaacttgtaaatatgtgcatgttgtttatgtttgtctgcctgtctcttattgcactaaattctgcaaggtgaataatttttttataccatttatttggaaaaagttcctcctccaactcttcttcactgaccttttaattagttggtaaacttagaaaaccaggtaggatttttgaagccctgagtttaaaagaagaatcgtggctatttgacatcatccttacattcccctgacttaaaaagctaacaagaagcacgagatcttccacctcattttagaaagcttttctacagaactatatgcttgcttatagctacctatctacagtttgaacagggagaaagggagatatgtatgtctggttacatcttccttcactcttgaattggctgggacagcaagcaacaacagtttgaggtccagtgacctacgtaaaatgagtgtcgtttgtgtcaggggacacatgtaactgtgcaacatggtattttctacagggagggctaggaagggtggttttggaacctaacctactttgtgtcttcattgtcagaactaaggttggaaatgccctttaaaggacttggtgaggcatatgctaggacaatagagctgctttagaaagaaattgagacatgttttgtcaggacagataaaagtttaatgcaggcttttgaacagatgttttaaaacaaatttgaccttaccaactatttttttcttctagccaaatcattgtacaggagtttcatatatgataaaaagtgttttgttattgtttttgctttcttggcaggggagaacccctaccattgtgagcagttactgtcactctggctgaatggacaaatagctgtgtaaatagcttctcataaaacgcttctactgatagctgtttgactttttcttcccgttatgaatgggaggaacatttgtaaacttcctttctgggtagctaccaaaaaacgtactggcttatggtcccatgtgaccttgtctccgttaagcccagaatctgagtgcctttagcaagtgttagcatttcacagagagaagagagacagaattattgctattaatcaccattcataaataggagcttggaataacaaaggtctgtgtgaattctgttctacgtcttttttttcccttttttaaataaatgtcaatttgatatcaagtaaaactattgtcattattgatcagaaaccatacattctgaaaatgaatccagttttcccaagctggcagaagtcagagatcatttttcaccttgatctgtgttgcgtttgtacttagtgaatggcagtgtggttgattggaagagcttgacactgatgtttggaaaaattctttattctagtggtcattttcaaacttgtcttctgtagagaggggaaaaattatgtatttgcagctaaagcgaagagactggcacaataattattaattgtgttagttcatttctatattaaatgaagcatcttcacaaatcaggtttgaagccattaaaagcaaaattttccctagtttaattaatttaaaattctaaattgcctgactacttagaatcttagaaacgccctgctagactgattttattatagaaatgttaacatgttcctcaacattttctcaagaaaattttcagacatatatcaaagttgaaaaaactttgcagtataaccactgctagattctgccatcaacatttgactatacttgtattgccatgtatctgttcatattctctatccctcttttcatccatcgatccatcagattttttttttaaagaacattccaaagtaaattttaggcaatacactgccctaaattcttagcatgggtgtcattaattaaggtttagtattcgtttaaatatctattttgaaagtggtgtatgaagttgataatctgagccaattaacatacttttttttttttcctcctgtggactttkgtcttccagtttctctttttgtgtgtacttagggtgagggaggacaattcctttcaaacacaagtttattttagaattggtcatttttaagtgcttgtcataaattttaaagtttcaatataatttttcttttccccacttctgataatgtatttttgccaaactatgcagcttcttcaaaaaactgtaaattactgattggggtttatgaaatcagcgaatacctcatttcaatctgttgctgcttttctccctcttgtcacttctcctttcactactttcagctgctctaccagaaggtagaggggagtaaagggtcaaacccctatataattagctgttttaaacaactctaggagagcagattaagtagcttagtaagttgaaactattaatttttctaaagaatttgatttgaattccttgagaattgtaattatccacacttcctccagctataattagcagaattaaaaatgattgtactgtacaatgagttgttgaaattgtaagccttagtaaccatctttagctttattgtagtcatgtttagaaaaaattatttttacatatgcctttatttttatgcccactttttgtggataagattctttagataaaatctaaagaattttaagtgactttctccaggtcatgaagattcaatgggtagaattgaatcagaattgaaatgttccagattcatattcttgtgtgtgtttgataaaattcatggcttccaaagtaactgaacacttcctttgggcccttggagggaaaatccatatttttactaattacacttttttttttagacatctggcagttctttgaacttaaacatattctcatggccatagttccaaattaagcccgacgcagttgctaaaaatcttgctgcactgttgaatactaataatgcaacatttattggatgtttttgcattttgatgaccttcatgattcatttataagtctttgtaagtgcttaagtgaccccctcactagtgaaaataataaatgttctatatcatttattattatttgtgtattctctacatgatatatttttttaaggaagagtaactccacatgtcagaatgagtgatattatcctagggcaaagcgcaaatagggcagtttgtttctactctgcaaatatggcatgtataggaacaaaactcttttggagtggctggtcattgttttgccctcttttggtacctgagtacctttctggggttttgtaaatcgtgtgtcatttgtaagaatttcacgttaactctgcgttacttggtgttcacctgtggtatccttgactgaccataatgatttagtttgggtatgatgtgtctgctttgaaatgccttactggagtatgtcagatcctgctttaaagcattccatatatctgctgggacaataagttgcttctccttggaaatatgctctagattcagaagcaaaaccgattttgctttcaccattaaggttgcattttaatgcagttattgttttaaattagagaataaaatgtaaaaccaagggaggctttagaaccctttattgaatggcatggcaaacttttaaaactgcttttgctatttcactagaactatctttgataaaggatatagctaaaaaatgtcagcccaaactgtgtgtaattagggttgtttattaaaattttctctaaatgtcatacagaggcttaagatctgtgtatgctgttgggtcggagtgccagtcactgctttggaagtctgtgttctggggctgcagaatgacaaacgtgtcatgggattaaaaccaatcaactgtgaattgtgaaattgaaactactctttcggttttattttctttagcatattgagtatagaaatctgaaacttatttaaaatttatactgcttttgttgatggctcattttggctgtgtatcctcacttatgtactgatttctgataaaggcttgacattattataacacgcattttgtgttccagtttaataaaacggtttctgagtcttgtctgaaaaaaaaaacgaaacacaaag

SEQ ID NO: 52 - DNA, 5923 bp, Homo sapien
ggcacgaggtctccaaaaaaaaaaaaaaaagaagctataatatatatctagattaactaatggagtgctctgtgaatattcattaactacattttatctatttactatattttatatgggtaagaccagtggtcatccgtatttcttttgaaagcccacttgatcaggaagtttatattttaagcagtatgtttgcacaatggtcagttcacatttgattgcttgtattactaattagaggtaaaacttctattttttcttgataattctgtaggccaactcagacccatgtttaaaaacgagttttgtgtgattaacccttgtatagtatccagttactgtcttctcttgaagtggtggttctttgagaagtagaattattttgtaacttttcttctcccagaaacagaagaatcaaatactattctgttaggattctatctagacctgtgactcttagtataataacccttttattattattattattttttttttttcagtaatctataaagtagagttgcttagttttgagcaatttagggcttttcttattggccagtaggttattcattttgctgctaaatataattttttggttaattttaacattatagtgctggccgcttggttctatgattacctaaaaatctagtttttttcctccataggtagatgtgtgtgtatgcatacccccacacacacacgtacatatatgttgtcatagagaggtatttcaacccttatttcaaataacagtagaagatacgaacatgaatttatattttgtaaaaatgtcattcatccactttgttttccattggaaatagttttataagaagggttccccttgctctctccacttaacaatttcattatatacgtagaaaaagcagccgacttaagggcttgatgttttttcaggccttgtggattcaggtttccagtttcccagtgcccttaatggatgttatgaatgcataagcacattttcttttaaagaaagaagttagatttatagtgttatttcttacttgctatatttctttgcactaaaaaagagctatgtgtttgttttataggacactttagtaccgtattgcctacaataactcagtttgctccttaaattccaaactctgggaagttgataaataacttccatgatcacttgtaaaagttacatgcacatctgaaaaaaaatcacaaatctctatgacagtaggttatgttttgagcttgttaccttgcagtattcttctctgttccataggtgaaaacaaagggtgacagaggttatcaggcaggaaatgcctaaatacatacatctctgcatggtacaatttctcatattcatgtattccataaacagtgttttttctctgtttaagcagactgttgtttcttctgagtcagtgatatgtgatcttcgttggtttcattttgtgaagctcagtctgtctctgtaacatactttaggatttgcaccttgtgctccccaggaattatgttagtgtccttttctatgctgtcttcaaggatggacagaggcctaaaccacaacaacaacaaaaattagaaaaaaaaatacttagatttcggtaatcatccataggaactcatagcatcagtctcttttctctgtgaataatatctttgtgtaagttgtcataaaaaatcaacgttagaagatgacaattagaattcttcttaggtattgagggtaagaagttgtaaagaaagaaaattcgtgtttcaactaaaagattggattgcatatacctttgaagtggttttgtaaaaaaagttcagttactaaactgagtgtgccctgtaatccttttgagtgcactgaagatgctttgaaaatactttgttggtcttcacattgtgcatcatgtcctgcaacttgtaaatatgtgcatgttgtttatgtttgtctgcctgtctcttattgcactaaattctgcaaggtgaataatttttttataccatttatttggaaaaagttcctcctccaactcttcttcactgaccttttaattagttggtaaacttagaaaaccaggtaggatttttgaagccctgagtttaaaagaagaatcgtggctatttgacatcatccttacattcccctgacttaaaaagctaacaagaagcacgagatcttccacctcattttagaaagcttttctacagaactatatgcttgcttatagctacctatctacagtttgaacagggagaaagggagatatgtatgtctggttacatcttccttcactcttgaattggctgggacagcaagcaacaacagtttgaggtccagtgacctacgtaaaatgagtgtcgtttgtgtcaggggacacatgtaactgtgcaacatggtattttctacagggagggctaggaagggtggttttggaacctaacctactttgtgtcttcattgtcagaactaaggttggaaatgccctttaaaggacttggtgaggcatatgctaggacaatagagctgctttagaaagaaattgagacatgttttgtcaggacagataaaagtttaatgcaggcttttgaacagatgttttaaaacaaatttgaccttaccaactatttttttcttctagccaaatcattgtacaggagtttcatatatgataaaaagtgttttgttattgtttttgctttcttggcaggggagaacccctaccattgtgagcagttactgtcactctggctgaatggacaaatagctgtgtaaatagcttctcataaaacgcttctactgatagctgtttgactttttcttcccgttatgaatgggaggaacatttgtaaacttcctttctgggtagctaccaaaaaacgtactggcttatggtcccatgtgaccttgtctccgttaagcccagaatctgagtgcctttagcaagtgttagcatttcacagagagaagagagacagaattattgctattaatcaccattcataaataggagcttggaataacaaaggtctgtgtgaattctgttctacgtcttttttttcccttttttaaataaatgtcaatttgatatcaagtaaaactattgtcattattgatcagaaaccatacattctgaaaatgaatccagttttcccaagctggcagaagtcagagatcatttttcaccttgatctgtgttgcgtttgtacttagtgaatggcagtgtggttgattggaagagcttgacactgatgtttggaaaaattctttattctagtggtcattttcaaacttgtcttctgtagagaggggaaaaattatgtatttgcagctaaagcgaagagactggcacaataattattaattgtgttagttcatttctatattaaatgaagcatcttcacaaatcaggtttgaagccattaaaagcaaaattttccctagtttaattaatttaaaattctaaattgcctgactacttagaatcttagaaacgccctgctagactgattttattatagaaatgttaacatgttcctcaacattttctcaagaaaattttcagacatatatcaaagttgaaaaaactttgcagtataaccactgctagattctgccatcaacatttgactatacttgtattgccatgtatctgttcatattctctatccctcttttcatccatcgatccatcagattttttttttaaagaacattccaaagtaaattttaggcaatacactgccctaaattcttagcatgggtgtcattaattaaggtttagtattcgtttaaatatctattttgaaagtggtgtatgaagttgataatctgagccaattaacatacttttttttttttcctcctgtggactttkgtcttccagtttctctttttgtgtgtacttagggtgagggaggacaattcctttcaaacacaagtttattttagaattggtcatttttaagtgcttgtcataaattttaaagtttcaatataatttttcttttccccacttctgataatgtatttttgccaaactatgcagcttcttcaaaaaactgtaaattactgattggggtttatgaaatcagcgaatacctcatttcaatctgttgctgcttttctccctcttgtcacttctcctttcactactttcagctgctctaccagaaggtagaggggagtaaagggtcaaacccctatataattagctgttttaaacaactctaggagagcagattaagtagcttagtaagttgaaactattaatttttctaaagaatttgatttgaattccttgagaattgtaattatccacacttcctccagctataattagcagaattaaaaatgattgtactgtacaatgagttgttgaaattgtaagccttagtaaccatctttagctttattgtagtcatgtttagaaaaaattatttttacatatgcctttatttttatgcccactttttgtggataagattctttagataaaatctaaagaattttaagtgactttctccaggtcatgaagattcaatgggtagaattgaatcagaattgaaatgttccagattcatattcttgtgtgtgtttgataaaattcatggcttccaaagtaactgaacacttcctttgggcccttggagggaaaatccatatttttactaattacacttttttttttagacatctggcagttctttgaacttaaacatattctcatggccatagttccaaattaagcccgacgcagttgctaaaaatcttgctgcactgttgaatactaataatgcaacatttattggatgtttttgcattttgatgaccttcatgattcatttataagtctttgtaagtgcttaagtgaccccctcactagtgaaaataataaatgttctatatcatttattattatttgtgtattctctacatgatatatttttttaaggaagagtaactccacatgtcagaatgagtgatattatcctagggcaaagcgcaaatagggcagtttgtttctactctgcaaatatggcatgtataggaacaaaactcttttggagtggctggtcattgttttgccctcttttggtacctgagtacctttctggggttttgtaaatcgtgtgtcatttgtaagaatttcacgttaactctgcgttacttggtgttcacctgtggtatccttgactgaccataatgatttagtttgggtatgatgtgtctgctttgaaatgccttactggagtatgtcagatcctgctttaaagcattccatatatctgctgggacaataagttgcttctccttggaaatatgctctagattcagaagcaaaaccgattttgctttcaccattaaggttgcattttaatgcagttattgttttaaattagagaataaaatgtaaaaccaagggaggctttagaaccctttattgaatggcatggcaaacttttaaaactgcttttgctatttcactagaactatctttgataaaggatatagctaaaaaatgtcagcccaaactgtgtgtaattagggttgtttattaaaattttctctaaatgtcatacagaggcttaagatctgtgtatgctgttgggtcggagtgccagtcactgctttggaagtctgtgttctggggctgcagaatgacaaacgtgtcatgggattaaaaccaatcaactgtgaattgtgaaattgaaactactctttcggttttattttctttagcatattgagtatagaaatctgaaacttatttaaaatttatactgcttttgttgatggctcattttggctgtgtatcctcacttatgtactgatttctgataaaggcttgacattattataacacgcattttgtgttccagtttaataaaacggtttctgagtcttgtctgaaaaaaaaaacgaaacacaaag

SEQ ID NO: 53 - DNA, 5887 bp, Homo sapien
  misc_feature (5870)..(5870): n=a, c, g or t
  misc_feature (5887)..(5887): n=a, c, g or t
ggcacgaggtctccaaaaaaaaaaaaaaaagaagctataatatatatctagattaactaatggagtgctctgtgaatattcattaactacattttatctatttactatattttatatgggtaagaccagtggtcatccgtatttcttttgaaagcccacttgatcaggaagtttatattttaagcagtatgtttgcacaatggtcagttcacatttgattgcttgtattactaattagaggtaaaacttctattttttcttgataattctgtaggcaaaaaaaattggggaaggcaaattacaatcattcttcttctgtaatactttgggacaatttttaaacaactcagacccatgtttaaaaacgagttttgtgtgattaacccttgtatagtatccagttactgtcttctcttgaagtggtggttctttgagaagtagaattattttgtaacttttcttctcccagaaacagaagaatcaaatactattctgttaggattctatctagacctgtgactcttagtataataacccttttattattattattattttttttttttcagtaatctataaagtagagttgcttagttttgagcaatttagggcttttcttattggccagtaggttattcattttgctgctaaatataattttttggttaattttaacattatagtgctggccgcttggttctatgattacctaaaaatctagtttttttcctccataggtagatgtgtgtgtatgcatacccccacacacacacgtacatatatgttgtcatagagaggtatttcaacccttatttcaaataacagtagaagatacgaacatgaatttatattttgtaaaaatgtcattcatccactttgttttccattggaaatagttttataagaagggttccccttgctctctccacttaacaatttcattatatacgtagaaaaagcagccgacttaagggcttgatgttttttcaggccttgtggattcaggtttccagtttcccagtgcccttaatggatgttatgaatgcataagcacattttcttttaaagaaagaagttagatttatagtgttatttcttacttgctatatttctttgcactaaaaaagagctatgtgtttgttttataggacactttagtaccgtattgcctacaataactcagtttgctccttaaattccaaactctgggaagttgataaataacttccatgatcacttgtaaaagttacatgcacatctgaaaaaaaatcacaaatctctatgacagtaggttatgttttgagcttgttaccttgcagtattcttctctgttccataggtgaaaacaaagggtgacagaggttatcaggcaggaaatgcctaaatacatacatctctgcatggtacaatttctcatattcatgtattccataaacagtgttttttctctgtttaagcagactgttgtttcttctgagtcagtgatatgtgatcttcgttggtttcattttgtgaagctcagtctgtctctgtaacatactttaggatttgcaccttgtgctccccaggaattatgttagtgtccttttctatgctgtcttcaaggatggacagaggcctaaaccacaacaacaacaaaaattagaaaaaaaaatacttagatttcggtaatcatccataggaactcatagcatcagtctcttttctctgtgaataatatctttgtgtaagttgtcataaaaaatcaacgttagaagatgacaattagaattcttcttaggtattgagggtaagaagttgtaaagaaagaaaattcgtgtttcaactaaaagattggattgcatatacctttgaagtggttttgtaaaaaaagttcagttactaaactgagtgtgccctgtaatccttttgagtgcactgaagatgctttgaaaatactttgttggtcttcacattgtgcatcatgtcctgcaacttgtaaatatgtgcatgttgtttatgtttgtctgcctgtctcttattgcactaaattctgcaaggtgaataatttttttataccatttatttggaaaaagttcctcctccaactcttcttcactgaccttttaattagttggtaaacttagaaaaccaggtaggatttttgaagccctgagtttaaaagaagaatcgtggctatttgacatcatccttacattcccctgacttaaaaagctaacaagaagcacgagatcttccacctcattttagaaagcttttctacagaactatatgcttgcttatagctacctatctacagtttgaacagggagaaagggagatatgtatgtctggttacatcttccttcactcttgaattggctgggacagcaagcaacaacagtttgaggtccagtgacctacgtaaaatgagtgtcgtttgtgtcaggggacacatgtaactgtgcaacatggtattttctacagggagggctaggaagggtggttttggaacctaacctactttgtgtcttcattgtcagaactaaggttggaaatgccctttaaaggacttggtgaggcatatgctaggacaatagagctgctttagaaagaaattgagacatgttttgtcaggacagataaaagtttaatgcaggcttttgaacagatgttttaaaacaaatttgaccttaccaactatttttttcttctagccaaatcattgtacaggagtttcatatatgataaaaagtgttttgttattgtttttgctttcttggcaggggagaacccctaccattgtgagcagttactgtcactctggctgaatggacaaatagctgtgtaaatagcttctcataaaacgcttctactgatagctgtttgactttttcttcccgttatgaatgggaggaacatttgtaaacttcctttctgggtagctaccaaaaaacgtactggcttatggtcccatgtgaccttgtctccgttaagcccagaatctgagtgcctttagcaagtgttagcatttcacagagagaagagagacagaattattgctattaatcaccattcataaataggagcttggaataacaaaggtctgtgtgaattctgttctacgtcttttttttcccttttttaaataaatgtcaatttgatatcaagtaaaactattgtcattattgatcagaaaccatacattctgaaaatgaatccagttttcccaagctggcagaagtcagagatcatttttcaccttgatctgtgttgcgtttgtacttagtgaatggcagtgtggttgattggaagagcttgacactgatgtttggaaaaattctttattctagtggtcattttcaaacttgtcttctgtagagaggggaaaaattatgtatttgcagctaaagcgaagagactggcacaataattattaattgtgttagttcatttctatattaaatgaagcatcttcacaaatcaggtttgaagccattaaaagcaaaattttccctagtttaattaatttaaaattctaaattgcctgactacttagaatcttagaaacgccctgctagactgattttattatagaaatgttaacatgttcctcaacattttctcaagaaaattttcagacatatatcaaagttgaaaaaactttgcagtataaccactgctagattctgccatcaacatttgactatacttgtattgccatgtatctgttcatattctctatccctcttttcatccatcgatccatcagattttttttttaaagaacattccaaagtaaattttaggcaatacactgccctaaattcttagcatgggtgtcattaattaaggtttagtattcgtttaaatatctattttgaaagtggtgtatgaagttgataatctgagccaattaacatacttttttttttttcctcctgtggactttkgtcttccagtttctctttttgtgtgtacttagggtgagggaggacaattcctttcaaacacaagtttattttagaattggtcatttttaagtgcttgtcataaattttaaagtttcaatataatttttcttttccccacttctgataatgtatttttgccaaactatgcagcttcttcaaaaaactgtaaattactgattggggtttatgaaatcagcgaatacctcatttcaatctgttgctgcttttctccctcttgtcacttctcctttcactactttcagctgctctaccagaaggtagaggggagtaaagggtcaaacccctatataattagctgttttaaacaactctaggagagcagattaagtagcttagtaagttgaaactattaatttttctaaagaatttgatttgaattccttgagaattgtaattatccacacttcctccagctataattagcagaattaaaaatgattgtactgtacaatgagttgttgaaattgtaagccttagtaaccatctttagctttattgtagtcatgtttagaaaaaattatttttacatatgcctttatttttatgcccactttttgtggataagattctttagataaaatctaaagaattttaagtgactttctccaggtcatgaagattcaatgggtagaattgaatcagaattgaaatgttccagattcatattcttgtgtgtgtttgataaaattcatggcttccaaagtaactgaacacttcctttgggcccttggagggaaaatccatatttttactaattacacttttttttttagacatctggcagttctttgaacttaaacatattctcatggccatagttccaaattaagcccgacgcagttgctaaaaatcttgctgcactgttgaatactaataatgcaacatttattggatgtttttgcattttgatgaccttcatgattcatttataagtctttgtaagtgcttaagtgaccccctcactagtgaaaataataaatgttctatatcatttattattatttgtgtattctctacatgatatatttttttaaggaagagtaactccacatgtcagaatgagtgatattatcctagggcaaagcgcaaatagggcagtttgtttctactctgcaaatatggcatgtataggaacaaaactcttttggagtggctggtcattgttttgccctcttttggtacctgagtacctttctggggttttgtaaatcgtgtgtcatttgtaagaatttcacgttaactctgcgttacttggtgttcacctgtggtatccttgactgaccataatgatttagtttgggtatgatgtgtctgctttgaaatgccttactggagtatgtcagatcctgctttaaagcattccatatatctgctgggacaataagttgcttctccttggaaatatgctctagattcagaagcaaaaccgattttgctttcaccattaaggttgcattttaatgcagttattgttttaaattagagaataaaatgtaaaaccaagggaggctttagaaccctttattgaatggcatggcaaacttttaaaactgcttttgctatttcactagaactatctttgataaaggatatagctaaaaaatgtcagcccaaactgtgtgtaattagggttgtttattaaaattttctctaaatgtcatacagaggcttaagatctgtgtatgctgttgggtcggagtgccagtcactgctttggaagtctgtgttctggggctgcagaatgacaaacgtgtcatgggattaaaaccaatcaactgtgaattgtgaaattgaaactactctttcggttttattttctttagcatattgagtatagaaatctgaaacttattttaccgattctgataaaggctggcattatatacacgcctttgngttccggttataaaccn

SEQ ID NO: 54 - DNA, 2055 bp, Homo sapien
gcccttagcgtggcgcggccgggtacttagggtgagggaggacaattcctttcaaacacaagtttattttagaattggtcatttttaagtgcttgtcataaattttaaagtttcaatataatttttcttttccccacttctgataatgtatttttgccaaactatgcagcttcttcaaaaaactgtaaattactgattggggtttatgaaatcagcgaatacctcatttcaatctgttgctgcttttctccctcttgtcacttctcctttcactactttcagctgctctaccagaaggtagaggggagtaaagggtcaaacccctatataattagctgttttaaacaactctaggagagcagattaagtagcttagtaagttgaaactattaatttttctaaagaatttgatttgaattccttgagaattgtaattatccacacttcctccagctataattagcagaattaaaaatgattgtactgtacaatgagttgttgaaattgtaagccttagtaaccatctttagctttattgtagtcatgtttagaaaaaattatttttacatatgcctttatttttatgcccactttttgtggataagattctttagataaaatctaaagaattttaagtgactttctccaggtcatgaagattcaatgggtagaattgaatcagaattgaaatgttccagattcatattcttgtgtgtgtttgataaaattcatggcttccaaagtaactgaacacttcctttgggcccttggagggaaaatccatatttttactaattacacttttttttttagacatctggcagttctttgaacttaaacatattctcatggccatagttccaaattaagcccgacgcagttgctaaaaatcttgctgcactgttgaatactaataatgcaacatttattggatgtttttgcattttgatgaccttcatgattcatttataagtctttgtaagtgcttaagtgaccccctcactagtgaaaataataaatgttctatatcatttattattatttgtgtattctctacatgatatatttttttaaggaagagtaactccacatgtcagaatgagtgatattatcctagggcaaagcgcaaatagggcagtttgtttctactctgcaaatatggcatgtataggaacaaaactcttttggagtggctggtcattgttttgccctcttttggtacctgagtacctttctggggttttgtaaatcgtgtgtcatttgtaagaatttcacgttaactctgcgttacttggtgttcacctgtggtatccttgactgaccataatgatttagtttgggtatgatgtgtctgctttgaaatgccttactggagtatgtcagatcctgctttaaagcattccatatatctgctgggacaataagttgcttctccttggaaatatgctctagattcagaagcaaaaccgattttgctttcaccattaaggttgcattttaatgcagttattgttttaaattagagaataaaatgtaaaaccaagggaggctttagaaccctttattgaatggcatggcaaacttttaaaactgcttttgctatttcactagaactatctttgataaaggatatagctaaaaaatgtcagcccaaactgtgtgtaattagggttgtttattaaaattttctctaaatgtcatacagaggcttaagatctgtgtatgctgttgggtcggagtgccagtcactgctttggaagtctgtgttctggggctgcagaatgacaaacgtgtcatgggattaaaaccaatcaactgtgaattgtgaaattgaaactactctttcggttttattttctttagcatattgagtatagaaatctgaaacttatttaaaatttatactgcttttgttgatggctcattttggctgtgtatcctcacttatgtactgatttctgataaaggcttgacattattataacacgcattttgtgttccagtttaataaaacggtttctgagtcttgtctgaaaaaaaaaacgaaacacaaag

SEQ ID NO: 55 - DNA, 4984 bp, Homo sapien
ggcacgaggtctccaaaaaaaaaaaaaaaagaagctataatatatatctagattaactaatggagtgctctgtgaatattcattaactacattttatctatttactatattttatatgggtaagaccagtggtcatccgtatttcttttgaaagcccacttgatcaggaagtttatattttaagcagtatgtttgcacaatggtcagttcacatttgattgcttgtattactaattagaggtaaaacttctattttttcttgataattctgtaggcaaaaaaaattggggaaggcaaattacaatcattcttcttctgtaatactttgggacaatttttaaacaactcagacccatgtttaaaaacgagttttgtgtgattaacccttgtatagtatccagttactgtcttctcttgaagtggtggttctttgagaagtagaattattttgtaacttttcttctcccagaaacagaagaatcaaatactattctgttaggattctatctagacctgtgactcttagtataataacccttttattattattattattttttttttttcagtaatctataaagtagagttgcttagttttgagcaatttagggcttttcttattggccagtaggttattcattttgctgctaaatataattttttggttaattttaacattatagtgctggccgcttggttctatgattacctaaaaatctagtttttttcctccataggtagatgtgtgtgtatgcatacccccacacacacacgtacatatatgttgtcatagagaggtatttcaacccttatttcaaataacagtagaagatacgaacatgaatttatattttgtaaaaatgtcattcatccactttgttttccattggaaatagttttataagaagggttccccttgctctctccacttaacaatttcattatatacgtagaaaaagcagccgacttaagggcttgatgttttttcaggccttgtggattcaggtttccagtttcccagtgcccttaatggatgttatgaatgcataagcacattttcttttaaagaaagaagttagatttatagtgttatttcttacttgctatatttctttgcactaaaaaagagctatgtgtttgttttataggacactttagtaccgtattgcctacaataactcagtttgctccttaaattccaaactctgggaagttgataaataacttccatgatcacttgtaaaagttacatgcacatctgaaaaaaaatcacaaatctctatgacagtaggttatgttttgagcttgttaccttgcagtattcttctctgttccataggtgaaaacaaagggtgacagaggttatcaggcaggaaatgcctaaatacatacatctctgcatggtacaatttctcatattcatgtattccataaacagtgttttttctctgtttaagcagactgttgtttcttctgagtcagtgatatgtgatcttcgttggtttcattttgtgaagctcagtctgtctctgtaacatactttaggatttgcaccttgtgctccccaggaattatgttagtgtccttttctatgctgtcttcaaggatggacagaggcctaaaccacaacaacaacaaaaattagaaaaaaaaatacttagatttcggtaatcatccataggaactcatagcatcagtctcttttctctgtgaataatatctttgtgtaagttgtcataaaaaatcaacgttagaagatgacaattagaattcttcttaggtattgagggtaagaagttgtaaagaaagaaaattcgtgtttcaactaaaagattggattgcatatacctttgaagtggttttgtaaaaaaagttcagttactaaactgagtgtgccctgtaatccttttgagtgcactgaagatgctttgaaaatactttgttggtcttcacattgtgcatcatgtcctgcaacttgtaaatatgtgcatgttgtttatgtttgtctgcctgtctcttattgcactaaattctgcaaggtgaataatttttttataccatttatttggaaaaagttcctcctccaactcttcttcactgaccttttaattagttggtaaacttagaaaaccaggtaggatttttgaagccctgagtttaaaagaagaatcgtggctatttgacatcatccttacattcccctgacttaaaaagctaacaagaagcacgagatcttccacctcattttagaaagcttttctacagaactatatgcttgcttatagctacctatctacagtttgaacagggagaaagggagatatgtatgtctggttacatcttccttcactcttgaattggctgggacagcaagcaacaacagtttgaggtccagtgacctacgtaaaatgagtgtcgtttgtgtcaggggacacatgtaactgtgcaacatggtattttctacagggagggctaggaagggtggttttggaacctaacctactttgtgtcttcattgtcagaactaaggttggaaatgccctttaaaggacttggtgaggcatatgctaggacaatagagctgctttagaaagaaattgagacatgttttgtcaggacagataaaagtttaatgcaggcttttgaacagatgttttaaaacaaatttgaccttaccaactatttttttcttctagccaaatcattgtacaggagtttcatatatgataaaaagtgttttgttattgtttttgctttcttggcaggggagaacccctaccattgtgagcagttactgtcactctggctgaatggacaaatagctgtgtaaatagcttctcataaaacgcttctactgatagctgtttgactttttcttcccgttatgaatgggaggaacatttgtaaacttcctttctgggtagctaccaaaaaacgtactggcttatggtcccatgtgaccttgtctccgttaagcccagaatctgagtgcctttagcaagtgttagcatttcacagagagaagagagacagaattattgctattaatcaccattcataaataggagcttggaataacaaaggtctgtgtgaattctgttctacgtcttttttttcccttttttaaataaatgtcaatttgatatcaagtaaaactattgtcattattgatcagaaaccatacattctgaaaatgaatccagttttcccaagctggcagaagtcagagatcatttttcaccttgatctgtgttgcgtttgtacttagtgaatggcagtgtggttgattggaagagcttgacactgatgtttggaaaaattctttattctagtggtcattttcaaacttgtcttctgtagagaggggaaaaattatgtatttgcagctaaagcgaagagactggcacaataattattaattgtgttagttcatttctatattaaatgaagcatcttcacaaatcaggtttgaagccattaaaagcaaaattttccctagtttaattaatttaaaattctaaattgcctgactacttagaatcttagaaacgccctgctagactgattttattatagaaatgttaacatgttcctcaacattttctcaagaaaattttcagacatatatcaaagttgaaaaaactttgcagtataaccactgctagattctgccatcaacatttgactatacttgtattgccatgtatctgttcatattctctatccctcttttcatccatcgatccatcagattttttttttaaagaacattccaaagtaaattttaggcaatacactgccctaaattcttagcatgggtgtcattaattaaggtttagtattcgtttaaatatctattttgaaagtggtgtatgaagttgataatctgagccaattaacatacttttttttttttcctcctgtggactttkgtcttccagtttctctttttgtgtgtacttagggtgagggaggacaattcctttcaaacacaagtttattttagaattggtcatttttaagtgcttgtcataaattttaaagtttcaatataatttttcttttccccacttctgataatgtatttttgccaaactatgcagcttcttcaaaaaactgtaaattactgattggggtttatgaaatcagcgaatacctcatttcaatctgttgctgcttttctccctcttgtcacttctcctttcactactttcagctgctctaccagaaggtagaggggagtaaagggtcaaacccctatataattagctgttttaaacaactctaggagagcagattaagtagcttagtaagttgaaactattaatttttctaaagaatttgatttgaattccttgagaattgtaattatccacacttcctccagctataattagcagaattaaaaatgattgtactgtacaatgagttgttgaaattgtaagccttagtaaccatctttagctttattgtagtcatgtttagaaaaaattatttttacatatgcctttatttttatgcccactttttgtggataagattctttagataaaatctaaagaattttaagtgactttctccaggtcatgaagattcaatgggtagaattgaatcagaattgaaatgttccagattcatattcttgtgtgtgtttgataaaattcatggcttccaaagtaactgaacacttcctttgggcccttggagggaaaatccatatttttactaattacacttttttttttagacatctggcagttctttgaacttaaacatattctcatggccatagttccaaattaagccgggcttgttgcaaatcttgtcgcccgtcgacacaccacaacgggccttctggggagtcgggttgcgacacacacgaacactaaactggagaggaaacccccccatgtaaaagtcgtgtcacacacggcgtgcacccacttgagaagaccccacacgtaattctccacgacaaccatcc

SEQ ID NO: 56 - DNA, 3152 bp, Homo sapien
ggcacgaggtctccaaaaaaaaaaaaaaaagaagctataatatatatctagattaactaatggagtgctctgtgaatattcattaactacattttatctatttactatattttatatgggtaagaccagtggtcatccgtatttcttttgaaagcccacttgatcaggaagtttatattttaagcagtatgtttgcacaatggtcagttcacatttgattgcttgtattactaattagaggtaaaacttctattttttcttgataattctgtaggcaaaaaaaattggggaaggcaaattacaatcattcttcttctgtaatactttgggacaatttttaaacaactcagacccatgtttaaaaacgagttttgtgtgattaacccttgtatagtatccagttactgtcttctcttgaagtggtggttctttgagaagtagaattattttgtaacttttcttctcccagaaacagaagaatcaaatactattctgttaggattctatctagacctgtgactcttagtataataacccttttattattattattattttttttttttcagtaatctataaagtagagttgcttagttttgagcaatttagggcttttcttattggccagtaggttattcattttgctgctaaatataattttttggttaattttaacattatagtgctggccgcttggttctatgattacctaaaaatctagtttttttcctccataggtagatgtgtgtgtatgcatacccccacacacacacgtacatatatgttgtcatagagaggtatttcaacccttatttcaaataacagtagaagatacgaacatgaatttatattttgtaaaaatgtcattcatccactttgttttccattggaaatagttttataagaagggttccccttgctctctccacttaacaatttcattatatacgtagaaaaagcagccgacttaagggcttgatgttttttcaggccttgtggattcaggtttccagtttcccagtgcccttaatggatgttatgaatgcataagcacattttcttttaaagaaagaagttagatttatagtgttatttcttacttgctatatttctttgcactaaaaaagagctatgtgtttgttttataggacactttagtaccgtattgcctacaataactcagtttgctccttaaattccaaactctgggaagttgataaataacttccatgatcacttgtaaaagttacatgcacatctgaaaaaaaatcacaaatctctatgacagtaggttatgttttgagcttgttaccttgcagtattcttctctgttccataggtgaaaacaaagggtgacagaggttatcaggcaggaaatgcctaaatacatacatctctgcatggtacaatttctcatattcatgtattccataaacagtgttttttctctgtttaagcagactgttgtttcttctgagtcagtgatatgtgatcttcgttggtttcattttgtgaagctcagtctgtctctgtaacatactttaggatttgcaccttgtgctccccaggaattatgttagtgtccttttctatgctgtcttcaaggatggacagaggcctaaaccacaacaacaacaaaaattagaaaaaaaaatacttagatttcggtaatcatccataggaactcatagcatcagtctcttttctctgtgaataatatctttgtgtaagttgtcataaaaaatcaacgttagaagatgacaattagaattcttcttaggtattgagggtaagaagttgtaaagaaagaaaattcgtgtttcaactaaaagattggattgcatatacctttgaagtggttttgtaaaaaaagttcagttactaaactgagtgtgccctgtaatccttttgagtgcactgaagatgctttgaaaatactttgttggtcttcacattgtgcatcatgtcctgcaacttgtaaatatgtgcatgttgtttatgtttgtctgcctgtctcttattgcactaaattctgcaaggtgaataatttttttataccatttatttggaaaaagttcctcctccaactcttcttcactgaccttttaattagttggtaaacttagaaaaccaggtaggatttttgaagccctgagtttaaaagaagaatcgtggctatttgacatcatccttacattcccctgacttaaaaagctaacaagaagcacgagatcttccacctcattttagaaagcttttctacagaactatatgcttgcttatagctacctatctacagtttgaacagggagaaagggagatatgtatgtctggttacatcttccttcactcttgaattggctgggacagcaagcaacaacagtttgaggtccagtgacctacgtaaaatgagtgtcgtttgtgtcaggggacacatgtaactgtgcaacatggtattttctacagggagggctaggaagggtggttttggaacctaacctactttgtgtcttcattgtcagaactaaggttggaaatgccctttaaaggacttggtgaggcatatgctaggacaatagagctgctttagaaagaaattgagacatgttttgtcaggacagataaaagtttaatgcaggcttttgaacagatgttttaaaacaaatttgaccttaccaactatttttttcttctagccaaatcattgtacaggagtttcatatatgataaaaagtgttttgttattgtttttgctttcttggcaggggagaacccctaccattgtgagcagttactgtcactctggctgaatggacaaatagctgtgtaaatagcttctcataaaacgcttctactgatagctgtttgactttttcttcccgttatgaatgggaggaacatttgtaaacttcctttctgggtagctaccaaaaaacgtactggcttatggtcccatgtgaccttgtctccgttaagcccagaatctgagtgcctttagcaagtgttagcatttcacagagagaagagagacagaattattgctattaatcaccattcataaataggagcttggaataacaaaggtctgtgtgaattctgttctacgtcttttttttcccttttttaaataaatgtcaatttgatatcaagta

SEQ ID NO: 57 - DNA, 1375 bp, Homo sapien
ggcacgaggtctccaaaaaaaaaaaaaaaagaagctataatatatatctagattaactaatggagtgctctgtgaatattcattaactacattttatctatttactatattttatatgggtaagaccagtggtcatccgtatttcttttgaaagcccacttgatcaggaagtttatattttaagcagtatgtttgcacaatggtcagttcacatttgattgcttgtattactaattagaggtaaaacttctattttttcttgataattctgtaggcaaaaaaaattggggaaggcaaattacaatcattcttcttctgtaatactttgggacaatttttaaacaactcagacccatgtttaaaaacgagttttgtgtgattaacccttgtatagtatccagttactgtcttctcttgaagtggtggttctttgagaagtagaattattttgtaacttttcttctcccagaaacagaagaatcaaatactattctgttaggattctatctagacctgtgactcttagtataataacccttttattattattattattttttttttttcagtaatctataaagtagagttgcttagttttgagcaatttagggcttttcttattggccagtaggttattcattttgctgctaaatataattttttggttaattttaacattatagtgctggccgcttggttctatgattacctaaaaatctagtttttttcctccataggtagatgtgtgtgtatgcatacccccacacacacacgtacatatatgttgtcatagagaggtatttcaacccttatttcaaataacagtagaagatacgaacatgaatttatattttgtaaaaatgtcattcatccactttgttttccattggaaatagttttataagaagggttccccttgctctctccacttaacaatttcattatatacgtagaaaaagcagccgacttaagggcttgatgttttttcaggccttgtggattcaggtttccagtttcccagtgcccttaatggatgttatgaatgcataagcacattttcttttaaagaaagaagttagatttatagtgttatttcttacttgctatatttctttgcactaaaaaagagctatgtgtttgttttataggacactttagtaccgtattgcctacaataactcagtttgctccttaaattccaaactctgggaagttgataaataacttccatgatcacttgtaaaagttacatgcacatctgaaaaaaaatcacaaatctctatgacagtaggtatgtttgagctgttacttgcagtttcttctcgttctaggtgaaaccagggggcgagttccgcgaagcaatactcatcgggga

SEQ ID NO: 58 - DNA, 967 bp, Homo sapien
ggaaaatgttggggagtttgggtttagctgggtgcagtcacccctagacttggatgtggagtgagtacccctgttgactttaacatctgtgtgtgtcttaaagaagactgctacttttctggtttattgtctatgcctacagatgacacgtggaataaattgcacattaaaatgtctgacatgaaaatcagaagagcttaagttcattccacagaagccttttgttagaatcttcaaaggatgagaaccaggatgaagaagagtttacagtagggaagtatttctcaactgtaattgtacataaaaattgcctatggtgctttaaaaaaatacagagtctggggacacatgttctcgggatctcctaagggctgtcacagaccataaagtttaagaagaaaaaaaaaaaatacagagtttgggacctcacccaaaacctaccaaaatgaaacttgtggagatgaggctcaacaatttgcattttcaaaagctctgtgggtgattctaatagccagtctgggaccttattgtgggccacattatgagaactactataacaggaagacatagacctgggctggctctaatggaaaggggccttctagagcgcctgggggttttgaactgtttgggtacagataactctttttagtctggatacttacagtgatcctgaaaatgtatattatgccttttctctttaggaaatctttgggaaggcttttttagagaacgtcttgtggatgaaaggggctctctttctaccacatctcttagacccactccaatccactccaaaccaccagagaaagtcctcattgttcagtagaaatccagctgccacactggatcattcccatcagcacaacacatgatgtcttcccatcttaaaaagcaattgttcttgaacacccctttcccccttcagctaccacctcatttctttatagaaaaattacttagtggg

SEQ ID NO: 59 - DNA, 968 bp, Homo sapien
ggaaaatgttggggagtttgggtttagctgggtgcagtcacccctagacttggatgtggagtgagtacccctgttgactttaacatctgtgtgtgtcttaaagaagactgctacttttctggtttattgtctatgcctacagatgacacgtggaataaattgcacattaaaatgtctgacatgaaaatcagaagagcttaagttcattccacagaagccttttgttagaatcttcaaaggatgagaaccaggatgaagaagagtttacagtagggaagtatttctcaactgtaattgtacataaaaattgcctatggtgctttaaaaaaatacagagtctggggacacatgttctcgggatctcctaagggctgtcacagaccataaagtttaagaagaaaaaaaaaaaatacagagtttgggacctcacccaaaacctaccaaaatgaaacttgtggagatgaggctcaacaatttgcattttcaaaagctctgtgggtgattctaatagccagtctgggaccttattgtgggccagattatgagaactactataacaggaagacatagacctgggctggctctaatggaaaggggccttctagagcgcctgggggttttgaactgtttgggtacagataactctttttagtctggatacttacagtgatcctgaaaatgtatattatgccttttctctttaggaaatctttgggaaggctttgttagagaacgtctttgtggatgaaaggggctctctttctccacatctcttagacccactccaatccactccaaaccaccagagaaagtcctcattgttcagtagaaatccagctgccacactggatcattcccatcagcacaacacatgatgtcttcccatcttaaaaagcaatttgttcttgaacacccctttcccccttcagctaccacctcatttctttatagaaaaattacttagtggg

SEQ ID NO: 60 - DNA, 671 bp, Homo sapien
aattccccttttgttcagtctctgcttcctgtagttgattaattatttttatgtgtatattttaaacctcatatggatattgtcaccaccatctgaaacaaatgcgttatacttgtgggctaattatataatgtctgagaaattattttttaatgttctttttgatactctagtgagtaaagttcatcttatgtttaattgttgtagtcaaatataactattcattattcccagtgctttctagcatcattgcttccacttatgctcttccttttgattgtctttcttgcatttccttgtgaccaaatcttagaaatcctccaagatctagcctaaatgctacaaagcgtttcatagtttttgtagctaattagaagccatctttccctattgtaaactttcatagtgtcaagattgtttcctaaggatatcatttctgtttaacatccattcattgtagtattcgtattgactttgttctttattagtttttatagagttttctaattatataagtttgtgaaactctaccattagagagtatattttttagagtatttgctattttacattataagatttgtcaggagtttgcgattagaggaatagagaaggcattttcatttctcattccttgtgtatgttctaattaaaagagaaaaacataatct

SEQ ID NO: 61 - DNA, 671 bp, Homo sapien; identical to SEQ ID NO: 60

SEQ ID NO: 62 - DNA, 1102 bp, Homo sapien
gactgctgctcagagcctggtcccccaccgctttctttacctaacttggaaatgagtgagatggactcaagatttgggacacatcagcaggagcgtttctaatgagttaatatctgcttgaggtcagcagcccagtgcatgctctgctctgagcattcattcatcttcaggggacattctgtgtttctgcatttcatcctctgcattcagaattttccatttgctcaggcccccagcagggcgtctggccacgttgggccgtgtttgtattgctggagtaaaggatgccagcacacttactcttctgcttcctcaggttttctgaaatctctgcagttaggctgttagcttcagctttatccctagacgtatattgattttatttgcactcctggtgaagtctgaattatagtcatgacaactagagttatgtcaacaatatgcaagccaggaagggcaggtctcttaattctgctgggaggccagttgccaaacaatacattaaaaagctcagagaaagaaaaatggtcagctcagggctcactgttgctcttgagccagagatcccagctggatcttgggcaagccagacttctcagcagaggaatagcccttcagagaaacccttccaagggcatggtttcagcttgctggcctggctaactagtctcgtgtggcctctggggagggtcatcatgtggccaaccaccctaaaggcagagagccctcccagcacttctctgtggctgtcccagcatgaacagtgattgcttgagagaaggagttcagattatgtatgaaggtgcaaatgcatggagttctgggctgcttgtctgcaccagctcacctgactatcaggctgccatttttatgtatagtttgtcatctggccaactagtgctggctacaagttggcctctgtcagttctgtcagtcttagtgcttaatgagcacaaatgtgaatgaatgagagagagaactctgagttttgaatgcatgtgcctgatatagtgcttggtctcaagatacaaacttgagtaagacttggtccttacctcctaggatctcacaggctagtgaggaagacagatcaataaatcca

SEQ ID NO: 63 - DNA, 1398 bp, Homo sapien
  misc_feature (53)..(53): n=a, c, g or t
tttttctagacagggtctcagtcctgtcgcccaggctggagtgcagtggagantcatggttcactgcaacctcaacctcctgacctcaagtgatccgcccatctcagcctcccgagtagctgggactacaagcatacatcaccacacccagctaacttttttctttttgtagacatgcggtttcaccatgttgcccaggctggtctcaaacgcctgagctcaagtgatccacccacctcagcctctcaaagtgctgggattataggtgtgagccaccacacccagcctcttcttcttggatttattgatctgtcttcctcactagcctgtgagatcctaggaggtaaggaccaagtcttactcaagtttgtatcttgagaccaagcactatatcaggcacatgcattcaaaactcagagttctctctctcattcattcacatttgtgctcattaagcactaagactgacagaactgacagaggccaacttgtagccagcactagttggccagatgacaaactatacataaaaatggcagcctgatagtcaggtgagctggtgcagacaagcagcccagaactccatgcatttgcaccttcatacataatctgaactccttctctcaagcaatcactgttcatgctgggacagccacagagaagtgctgggagggctctctgcctttagggtggttggccacatgatgaccctccccagaggccacacgagactagttagccaggccagcaagctgaaaccatgcccttggaagggtttctctgaagggctattcctctgctgagaagtctggcttgcccaagatccagctgggatctctggctcaagagcaacagtgagccctgagctgaccatttttctttctctgagctttttaatgtattgtttggcaactggcctcccagcagaattaagagacctgcccttcctggcttgcatattgttgacataactctagttgtcatgactataattcagacttcaccaggagtgcaaataaaatcaatatacgtctagggataaagctgaagctaacagcctaactgcagagatttcagaaaacctgaggaagcagaagagtaagtgtgctggcatcctttactccagcaatacaaacacggcccaacgtggccagacgccctgctgggggcctgagcaaatggaaaattctgaatgcagaggatgaaatgcagaaacacagaatgtcccctgaagatgaatgaatgctcagagcagagcatgcactgggctgctgacctcaagcagatattaactcattagaaacgctcctgctgatgtgtcccaaatcttgagtccatctcactcatttccaagttaggtaaagaaagcggtgggggaccaggctctgagcagcagtc

SEQ ID NO: 64 - DNA, 1395 bp, Homo sapien
gactgctgctcagagcctggtcccccaccgctttctttacctaacttggaaatgagtgagatggactcaagatttgggacacatcagcaggagcgtttctaatgagttaatatctgcttgaggtcagcagcccagtgcatgctctgctctgagcattcattcatcttcaggggacattctgtgtttctgcatttcatcctctgcattcagaattttccatttgctcaggcccccagcagggcgtctggccacgttgggccgtgtttgtattgctggagtaaaggatgccagcacacttactcttctgcttcctcaggttttctgaaatctctgcagttaggctgttagcttcagctttatccctagacgtatattgattttatttgcactcctggtgaagtctgaattatagtcatgacaactagagttatgtcaacaatatgcaagccaggaagggcaggtctcttaattctgctgggaggccagttgccaaacaatacattaaaaagctcagagaaagaaaaatggtcagctcagggctcactgttgctcttgagccagagatcccagctggatcttgggcaagccagacttctcagcagaggaatagcccttcagagaaacccttccaagggcatggtttcagcttgctggcctggctaactagtctcgtgtggcctctggggagggtcatcatgtggccaaccaccctaaaggcagagagccctcccagcacttctctgtggctgtcccagcatgaacagtgattgcttgagagaaggagttcagattatgtatgaaggtgcaaatgcatggagttctgggctgcttgtctgcaccagctcacctgactatcagctgcctttttatgttagtttgtcatctggccaactagtgctggctacaagttggcctctgtcagttctgtcagtcttagtgcttaatgagcacaaatgtgaatgaatgagagagagaactctgagttttgaatgcatgtgcctgatatagtgcttggtctcaagatacaaacttgagtaagacttggtccttacctcctaggatctcacaggctagtgaggaagacagatcaataaatccaagaagaagaggctgggtgtggtggctcacacctataatcccagcactttgagaggctgaggtgggtggatcacttgagctcaggcgtttgagaccagcctgggcaacatggtaaaaccgcatgtctacaaaaaaaaaaaaattagctgggtgtggtgatgtatgcttgtagtcccagctactcaggaggctgagatgggcggatcacttgaggtcaggaggttgaggttgcagtgaaccatgatcatgccactgcactccagcctgggcgacagagtgagaccctgtctagaaaaa

SEQ ID NO: 65 - DNA, 538 bp, Homo sapien
gagcgctatcggtcaggtaagcacggggtggggtgatacaatacgtccatctgccacctgtgccaggacggtgcctgtgcccagccactgggcgaggcagaagtgcagtgggcgtggacctgcagcacgcgaggggcctccagctttctgcacggacacaccctctcgggagacgccagtgtccggtaaatagctcttcacgtggtttacaagcccatgttggctactattcagaatttcatattaattaaaaagattataatctcgtgccaaatttttcttttttaggtgtcactgttaaataactttttaatcgtggttgctagtatagttttttctttttcttaccatcagtgatttgttttctaggtctacttttctaaacagaaatgaaaaccatacattgttatgtgtttcctgtctttcatctgtgttttatgatgccgtctgcaaagggttgtctggagactgagttgccagtgccacctgggcttggccagctgaaatttcattaatttagcaacagaaaacttaggct

SEQ ID NO: 66 - DNA, 761 bp, Homo sapien
ccgaacccctggtaatagaattgtttacctttataattgccaacccagaaacaaaaggaccgctgggggactcacaccttggagagatttgggttcacagtgcccacaatgccagcggttatttcactatttacggagacgaatccctccagtcagatcacttcaactcaagactaagttttggagacacccagaccatctgggcacgcacaggctacttggggttcctgcggagaactgagctcacagatgcaaatggagagcgccatgatgccctctacgtggtaggggcactggacgaagccatggagctgcggggcatgcggtaccacccaatcgacattgagacctcggtcatcagagcccataaaagcgttacggaatggtaagtcgtgagcttgcagcttgtacccaaatcaggagcagagtttgtgaagcattgagaatgtggagagcacggcggtggaggagagttttgttaaggtagggaagggggtgcgattcaacatttgactataaatctttatcttttggggttaaagcaacaaaagaacatgccacatgtagagttaatgtaccatatattacctgaaaacgatagacttctattgccgtgaaaactacttgacagcattttccaggaagccaaattgtttggtttttaatttacaaaatcatgatataggaagaaaacaaacctcacacatatgtaggcacagaaaatacttttatgactgttgacttgggaactggaagtaaca

SEQ ID NO: 67 - DNA, 7848 bp, Homo sapien
ggggggggagggaggtccctgcgcgcccgccgcccgcctcccgcgcccgcgccgccgcctcctcctcggtgcggttccgccgggcgcgaggagccgccgagacctccgcctgcgaacaaagaggaggccgtgcggggcgcggcgcccgcggagcatggcggaccgcagcctgggagggcatggcgctgcccctggaggtgcgggcgcgcctggccgagctggagctggagctgtcggaaggtgacatcacacaaaaaggatatgaaaagaagaggtcaaagttaattggagcctaccttccgcagcctccgacagcgaatggagctgccgtggttcggtgtagactgcagcacagtgaaggagcgccgaggagaacattccgctctgcccacatcggggtgtgcgacgtccgagaagctgcggctcgggagcgggtggccagcaccgcagggaaccggcctctgttttactttcgtttcggggtggaccaagctttgccgcaagaacgccgggctcctgtcactccttcctccgcctctcgctaccaccgccgacggtcttcagggtcacgagatgagcgctatcggtcagacgtccacacggaagctgtccaggcggctctggccaaacacaaagagcggaagatggcagtgcctatgccttccaaacgcaggtccctggtcgtgcagacctcgatggacgcctacacccctccagatacctcttctggctcagaagatgaaggctcagtgcagggggactcccagggcacccccacctccagccagggcagcatcaatatggagcactggatcagccaggccatccacggctccaccacgtccaccacctcctcgtcctctacgcagagcgggggcagcggggctgcccacaggctggcggacgtcatggctcagacccacatagaaaatcattctgcacctcctgacgtaaccacgtacacctcagagcactcgatacaggtggagagaccgcagggttccacggggtcccggacagcgcccaagtacggcaacgccgagctcatggagaccggggatggagtaccagtaagtagccgggtgtcagcaaaaatccagcagcttgtcaataccctcaaacgaccgaaacgaccacctttacgagaattctttgtcgatgactttgaagaattattagaagttcaacaaccggatccgaaccaaccaaagccggagggggcccagatgctggccatgcgcggagagcagctgggcgtggtcacgaactggccgccgtcgctggaggccgcactgcagaggtggggcaccatctcgcccaaggcgccctgcctgaccaccatggacaccaacgggaagcccctctacatcctcacttacggcaagctgtggacaagaagtatgaaggtcgcttacagcattctacacaaattaggcacaaagcaggaacccatggtccggcctggagatagggtggcactggtgttccccaacaatgatccggctgccttcatggcggctttctacggctgcctgctggccgaggtggtccccgtgcccatcgaggtgccactcaccaggaaggacgcagggagccagcagataggtttcttgcttggaagctgtggagttactgtagccttgactagtgacgcctgccataaaggacttccaaaaagcccaacgggagagatcccacagtttaaaggttggccaaagctgctgtggtttgtcacagagtctaaacatctctccaaaccgccccgagactggttcccacacattaaagatgccaataacgacactgcgtatattgagtacaagacgtgtaaggatggcagtgtgctgggtgtgacggtgacgaggactgcgctgctgacacactgccaggccctgacgcaggcgtgtggctacacggaagctgaaaccattgtgaatgtgctggatttcaagaaggacgtcgggctctggcatggcatcctgacaagcgtcatgaacatgatgcatgtgatcagcatcccgtactcgctgatgaaggtgaaccctctctcctggatccagaaggtctgccagtacaaagcaaaagtggcgtgtgtgaaatcgagggatatgcattgggcattagtagcacacagagatcagagagacatcaacctctcctctctgcgaatgctgatagtggcggacggcgcgaacccctggtctatttcttcttgcgatgcatttctcaatgtcttccaaagtaaaggccttcgacaggaggtcatctgtccttgtgccagctcgccagaggccctcactgtggccatccggaggcccacggatgacagtaaccagcccccgggccggggtgtcctctccatgcatggactgacctatggggtcattcgtgtggactcggaagagaagctgtccgtgctcaccgtgcaggatgtcggcctcgtgatgcctggagccatcatgtgttcagtgaagccagacggggttcctcagctgtgcagaacggatgagatcggggagctgtgtgtgtgtgcagttgcgacgggcacgtcctactatggcctctctggcatgaccaagaacacctttgaggtgtttcccatgacaagctccggggctccgatcagtgaatacccattcataaggacaggcttgctggggttcgtgggtcccggaggcctcgtcttcgtggtgggcaagatggatggcctcatggtggtcagcgggcgcaggcacaacgccgacgacatcgtggccactgcgctggccgtagaacccatgaagtttgtctaccggggaaggatagccgtgttctcggtgaccgtgctgcacgacgagaggatcgtgatcgtggctgagcagaggcctgactccacggaagaggacagtttccagtggatgagccgtgtgctgcaggcgattgacagtatacatcaagttggagtttattgcctggccttggtgccagcaaacaccctccccaaaaccccgcttggtgggatccatttatcagaaacaaaacagctttttctggagggctctctgcacccctgcaatgtcctaatgtgcccccacacctgcgtcacaaacttgcctaagcctcgacagaagcagccagaaatcggccctgcctctgtgatggtggggaacctggtctctgggaagagaatcgcccaggccagtggcagagacctgggtcagatcgaagataacgaccaggcacgcaagttcctgttcctctcagaggtcttgcagtggagagcacagaccaccccggaccacatcctctacacgctgctcaactgtcggggtgcgatagcgaactcgctgacctgcgtgcagctgcacaagagagctgagaagatcgccgtgatgctgatggagaggggccaccttcaggacggcgaccacgtggccttggtctaccccccaggaatagacctgatagcagcgttttatggttgcctgtacgcaggctgtgtgccaataaccgtccgtcccccgcacccacagaacatcgcgacgacgttgcctaccgtcaagatgattgtggaggtgagtcgctctgcctgtctgatgacgacacagctgatctgtaagttgctgcggtccagggaggcggcggcggctgtggacgtcaggacgtggcccctcatcctggacacagatgatttgccaaagaagcggcctgcccagatctgcaaaccttgcaacccagacactcttgcatatctcgacttcagcgtgtccacaactgggatgctagctggcgtaaagatgtctcacgcagccaccagtgccttctgccgttccattaagctgcagtgtgaactttacccctctagagaagtggccatctgcctggacccttactgtggactgggatttgtcctctggtgcctctgcagtgtgtattctgggcaccagtccatcctgatcccgccctctgagctggaaaccaaccccgccttgtggcttcttgccgtgagtcagtacaaagtccgagacacgttttgctcctactccgtgatggagctgtgcaccaaggggctgggctcgcaaacagagtccctcaaggcgcgagggctggacttgtcccgagtgaggacctgcgtggttgtggcggaagagaggcctcggatcgcactcacacagtcgttctcaaagctgtttaaggacctgggccttcacccgcgggccgtcagcacctcgttcggttgcagggtgaacctggcgatttgcttgcagggaacctcaggacctgacccaaccactgtctacgtggacatgagagccctgagacacgacagagtccgcttagtggaaagaggatcccctcatagtctgcccctgatggaatcgggaaagatacttccaggggttcggattataattgccaacccagaaacaaaaggaccgctgggggactcacaccttggagagatttgggttcacagtgcccacaatgccagcggttatttcactatttacggagacgaatccctccagtcagatcacttcaactcaagactaagttttggagacacccagaccatctgggcacgcacaggctacttggggttcctgcggagaactgagctcacagatgcaaatggagagcgccatgatgccctctacgtggtaggggcactggacgaagccatggagctgcggggcatgcggtaccacccaatcgacattgagacctcggtcatcagagcccataaaagcgttacggaatgtgctgtgtttacctggacaaatttgttggtggttgtggttgagctggatgggtcggaacaagaagccttggacctggttcccttggtgaccaacgtggtcctggaggagcactacctgatcgtcggagtggtggtcgtggtggacatcggcgtcatccccatcaactcccgtggggagaagcagcgcatgcacctgcgagacgggtttttggcagaccagctagaccccatctatgtggcctacaacatgtagtctcgtctcttggcttccatggacttttctagagatgtagacattgttctccgtgtccactgaagcgtgcagacacagggcaacactcaccagaatacagccatttgtggtgagagtggaggaggaagaggaggaggaagaggacttctcacagcagccacgattggcatgggggtgaaatgtgaatttaccactgaatttcgctcagaaggactttggattactgccttcagtttgttggaaaagcccatttcaaaaactttcttttcttttctttcttttttaattattggataataagtgctttcttcgtaaatgtggtattttgttaagccgaaatagcaattaaaaaaatatcctgccctccagatgggttcttttaaacaatttatgtagtgtgacaaagaattgttttctctgttttaatgtgtcatgaaatcttaatgacatggatctgttactaatttaagccattgctagatctcatccttttaggaaagtttgaggtacgagaaaaccttccaaatagcaccttccaattagataatagcagctttctttgtcagaaatgtgctgaagaaacaaaggctggtatacggccttcgaagttagtatagaatgagaagaaattataaataaggtgtatttcggcaattatcttgcaaatatctttgtactaaactaaaaagataaaataagttaacttcctcaatatgtaattatgtacaaaacgtttaatttattttgatctctttagaactataaaagagaaaaacattcaagaatattaaagtcttgtaatgtttgctaatataaaaaagtgttgtattatcttgcgtggatagtatcacaacaaatatatatatatgaaatataaattcactaatgaacaaaggagattttaaagtttaagatgcagaacttgtcacttgcatggtgtgccccccgtactcacatacactctgctgttgccagcagtcgcagaccgcaggagccctgtctaaaagtttcttctagaaccagagaccagcaagtgaaattattgccatctcaaggatggcaaaagaattcaaagctcaatgtgcactatttttttctttgctgtgggacaacagtgaatgtgtttatgccagcgtgtgctgatgatactgaggggctttaggttggcaaatagcactgttttcttagctgcaagaattcattgcacaatgtttttcatcatttttgttaatgtcatctttttttggtccttgctacgaaaaggaatgcgattctgtggtcattcgcactgggttgcattgattccccctctgatggccaatgtggagtggacaaagtgtccggaactcacatcggtgatcgtcccctcgtcttaagacccagcccgctctgtgtgagcctctggggctccctcgctcagtgagcacagttccccgggggttcatgccagagctccggctgaagcaagaagtcctccagctgcgtcgtttgccgcctgtggacgagtgcgccccagtttctgccctggcagctcctggccacaccttctcagagctcacctgtgcacttctaaattgaattggcccacggtgtccaaccaagaaggagcatctgcactccgagaaagatgtgttctgtaactgccccagtgtgaccccgcagtggctctcggtgctagatatgcatgactaagattgatgctgggcaaaatgtagatgatctttcattatgttgtgggcagcgtctttctctgcctttgctatatgcagtcagcagtaagccttttgctaaaagagttttgtttgacttctgagatccaaggctgattgttgttaaaaaaaaaaaaaaaaaaaagtggcacatttaaaaaaatgtgtctgcatatgtggtgcatccttccatctccacaaaccatttgattcttgaaatattgtttgacctcattgctgtgtgtgaatatttctccacatgcttcagatgcacattcctagtctctgcttcctaaggggggaaccaccacacattggggggaaaaaagacattttcctacacccacccaccttgttgaaagggaggtaggtttggggcttcaggccaggcactgactatgaaacattagctgcagtgtgcaggacagctttgaggtccagctgaagtcaggaagcaaaacaaatgtagatgtcacttcaaacataatttcaactgtcaccagatcaactctacattcaaggagtgtggacgctgcagtgcagttgtgagggcagttagcagccgcctcttctgcatcctgtcaactctgattagttagagtttaggctcaaaagagttggtggactgagattgaaatttggttgtgcaagagaaaggaaaggagacacttagtaccaccagtttcagcaataaagaagggtcattctgtattcaaaattgtactgtagataaatcattcatgagattgtaaaaaatgtttgtcttgtgaccttgtgcttttgaagtcagacaaaaccgtgtaatcaacttgcacaaaaagagggtacacagtgaacatataaacacagacctaatcaaacaggagcagattcctcatggtgcttgtttattatatatatttaatcctgcttgacactttacccaagggagatggtcccttttatcagttgaatgttagcagcgttatttcagagtgtggtgactggttagagaaactcatgtactcaaccagccacagtttcaaacaaaatttttatgtgcaaaggacagcaaccttcttgtatgttaaaccaccagtacgctttgtacatctgtgataacgcctgttttatattcaaatgaacaaataaaagcttttattttt

SEQ ID NO: 68 - DNA, 7680 bp, Homo sapien
ggggggggagggaggtccctgcgcgcccgccgcccgcctcccgcgcccgcgccgccgcctcctcctcggtgcggttccgccgggcgcgaggagccgccgagacctccgcctgcgaacaaagaggaggccgtgcggggcgcggcgcccgcggagcatggcggaccgcagcctgggagggcatggcgctgcccctggaggtgcgggcgcgcctggccgagctggagctggagctgtcggaaggtgacatcacacaaaaaggatatgaaaagaagaggtcaaagttaattggagcctaccttccgcagcctccgagggtggaccaagctttgccgcaagaacgccgggctcctgtcactccttcctccgcctctcgctaccaccgccgacggtcttcagggtcacgagatgagcgctatcggtcagacgtccacacggaagctgtccaggcggctctggccaaacacaaagagcggaagatggcagtgcctatgccttccaaacgcaggtccctggtcgtgcagacctcgatggacgcctacacccctccagatacctcttctggctcagaagatgaaggctcagtgcagggggactcccagggcacccccacctccagccagggcagcatcaatatggagcactggatcagccaggccatccacggctccaccacgtccaccacctcctcgtcctctacgcagagcgggggcagcggggctgcccacaggctggcggacgtcatggctcagacccacatagaaaatcattctgcacctcctgacgtaaccacgtacacctcagagcactcgatacaggtggagagaccgcagggttccacggggtcccggacagcgcccaagtacggcaacgccgagctcatggagaccggggatggagtaccagtaagtagccgggtgtcagcaaaaatccagcagcttgtcaataccctcaaacgaccgaaacgaccacctttacgagaattctttgtcgatgactttgaagaattattagaagttcaacaaccggatccgaaccaaccaaagccggagggggcccagatgctggccatgcgcggagagcagctgggcgtggtcacgaactggccgccgtcgctggaggccgcactgcagaggtggggcaccatctcgcccaaggcgccctgcctgaccaccatggacaccaacgggaagcccctctacatcctcacttacggcaagctgtggacaagaagtatgaaggtcgcttacagcattctacacaaattaggcacaaagcaggaacccatggtccggcctggagatagggtggcactggtgttccccaacaatgatccggctgccttcatggcggctttctacggctgcctgctggccgaggtggtccccgtgcccatcgaggtgccactcaccaggaaggacgcagggagccagcagataggtttcttgcttggaagctgtggagttactgtagccttgactagtgacgcctgccataaaggacttccaaaaagcccaacgggagagatcccacagtttaaaggttggccaaagctgctgtggtttgtcacagagtctaaacatctctccaaaccgccccgagactggttcccacacattaaagatgccaataacgacactgcgtatattgagtacaagacgtgtaaggatggcagtgtgctgggtgtgacggtgacgaggactgcgctgctgacacactgccaggccctgacgcaggcgtgtggctacacggaagctgaaaccattgtgaatgtgctggatttcaagaaggacgtcgggctctggcatggcatcctgacaagcgtcatgaacatgatgcatgtgatcagcatcccgtactcgctgatgaaggtgaaccctctctcctggatccagaaggtctgccagtacaaagcaaaagtggcgtgtgtgaaatcgagggatatgcattgggcattagtagcacacagagatcagagagacatcaacctctcctctctgcgaatgctgatagtggcggacggcgcgaacccctggtctatttcttcttgcgatgcatttctcaatgtcttccaaagtaaaggccttcgacaggaggtcatctgtccttgtgccagctcgccagaggccctcactgtggccatccggaggcccacggatgacagtaaccagcccccgggccggggtgtcctctccatgcatggactgacctatggggtcattcgtgtggactcggaagagaagctgtccgtgctcaccgtgcaggatgtcggcctcgtgatgcctggagccatcatgtgttcagtgaagccagacggggttcctcagctgtgcagaacggatgagatcggggagctgtgtgtgtgtgcagttgcgacgggcacgtcctactatggcctctctggcatgaccaagaacacctttgaggtgtttcccatgacaagctccggggctccgatcagtgaatacccattcataaggacaggcttgctggggttcgtgggtcccggaggcctcgtcttcgtggtgggcaagatggatggcctcatggtggtcagcgggcgcaggcacaacgccgacgacatcgtggccactgcgctggccgtagaacccatgaagtttgtctaccggggaaggatagccgtgttctcggtgaccgtgctgcacgacgagaggatcgtgatcgtggctgagcagaggcctgactccacggaagaggacagtttccagtggatgagccgtgtgctgcaggcgattgacagtatacatcaagttggagtttattgcctggccttggtgccagcaaacaccctccccaaaaccccgcttggtgggatccatttatcagaaacaaaacagctttttctggagggctctctgcacccctgcaatgtcctaatgtgcccccacacctgcgtcacaaacttgcctaagcctcgacagaagcagccagaaatcggccctgcctctgtgatggtggggaacctggtctctgggaagagaatcgcccaggccagtggcagagacctgggtcagatcgaagataacgaccaggcacgcaagttcctgttcctctcagaggtcttgcagtggagagcacagaccaccccggaccacatcctctacacgctgctcaactgtcggggtgcgatagcgaactcgctgacctgcgtgcagctgcacaagagagctgagaagatcgccgtgatgctgatggagaggggccaccttcaggacggcgaccacgtggccttggtctaccccccaggaatagacctgatagcagcgttttatggttgcctgtacgcaggctgtgtgccaataaccgtccgtcccccgcacccacagaacatcgcgacgacgttgcctaccgtcaagatgattgtggaggtgagtcgctctgcctgtctgatgacgacacagctgatctgtaagttgctgcggtccagggaggcggcggcggctgtggacgtcaggacgtggcccctcatcctggacacagatgatttgccaaagaagcggcctgcccagatctgcaaaccttgcaacccagacactcttgcatatctcgacttcagcgtgtccacaactgggatgctagctggcgtaaagatgtctcacgcagccaccagtgccttctgccgttccattaagctgcagtgtgaactttacccctctagagaagtggccatctgcctggacccttactgtggactgggatttgtcctctggtgcctctgcagtgtgtattctgggcaccagtccatcctgatcccgccctctgagctggaaaccaaccccgccttgtggcttcttgccgtgagtcagtacaaagtccgagacacgttttgctcctactccgtgatggagctgtgcaccaaggggctgggctcgcaaacagagtccctcaaggcgcgagggctggacttgtcccgagtgaggacctgcgtggttgtggcggaagagaggcctcggatcgcactcacacagtcgttctcaaagctgtttaaggacctgggccttcacccgcgggccgtcagcacctcgttcggttgcagggtgaacctggcgatttgcttgcagggaacctcaggacctgacccaaccactgtctacgtggacatgagagccctgagacacgacagagtccgcttagtggaaagaggatcccctcatagtctgcccctgatggaatcgggaaagatacttccaggggttcggattataattgccaacccagaaacaaaaggaccgctgggggactcacaccttggagagatttgggttcacagtgcccacaatgccagcggttatttcactatttacggagacgaatccctccagtcagatcacttcaactcaagactaagttttggagacacccagaccatctgggcacgcacaggctacttggggttcctgcggagaactgagctcacagatgcaaatggagagcgccatgatgccctctacgtggtaggggcactggacgaagccatggagctgcggggcatgcggtaccacccaatcgacattgagacctcggtcatcagagcccataaaagcgttacggaatgtgctgtgtttacctggacaaatttgttggtggttgtggttgagctggatgggtcggaacaagaagccttggacctggttcccttggtgaccaacgtggtcctggaggagcactacctgatcgtcggagtggtggtcgtggtggacatcggcgtcatccccatcaactcccgtggggagaagcagcgcatgcacctgcgagacgggtttttggcagaccagctagaccccatctatgtggcctacaacatgtagtctcgtctcttggcttccatggacttttctagagatgtagacattgttctccgtgtccactgaagcgtgcagacacagggcaacactcaccagaatacagccatttgtggtgagagtggaggaggaagaggaggaggaagaggacttctcacagcagccacgattggcatgggggtgaaatgtgaatttaccactgaatttcgctcagaaggactttggattactgccttcagtttgttggaaaagcccatttcaaaaactttcttttcttttctttcttttttaattattggataataagtgctttcttcgtaaatgtggtattttgttaagccgaaatagcaattaaaaaaatatcctgccctccagatgggttcttttaaacaatttatgtagtgtgacaaagaattgttttctctgttttaatgtgtcatgaaatcttaatgacatggatctgttactaatttaagccattgctagatctcatccttttaggaaagtttgaggtacgagaaaaccttccaaatagcaccttccaattagataatagcagctttctttgtcagaaatgtgctgaagaaacaaaggctggtatacggccttcgaagttagtatagaatgagaagaaattataaataaggtgtatttcggcaattatcttgcaaatatctttgtactaaactaaaaagataaaataagttaacttcctcaatatgtaattatgtacaaaacgtttaatttattttgatctctttagaactataaaagagaaaaacattcaagaatattaaagtcttgtaatgtttgctaatataaaaaagtgttgtattatcttgcgtggatagtatcacaacaaatatatatatatgaaatataaattcactaatgaacaaaggagattttaaagtttaagatgcagaacttgtcacttgcatggtgtgccccccgtactcacatacactctgctgttgccagcagtcgcagaccgcaggagccctgtctaaaagtttcttctagaaccagagaccagcaagtgaaattattgccatctcaaggatggcaaaagaattcaaagctcaatgtgcactatttttttctttgctgtgggacaacagtgaatgtgtttatgccagcgtgtgctgatgatactgaggggctttaggttggcaaatagcactgttttcttagctgcaagaattcattgcacaatgtttttcatcatttttgttaatgtcatctttttttggtccttgctacgaaaaggaatgcgattctgtggtcattcgcactgggttgcattgattccccctctgatggccaatgtggagtggacaaagtgtccggaactcacatcggtgatcgtcccctcgtcttaagacccagcccgctctgtgtgagcctctggggctccctcgctcagtgagcacagttccccgggggttcatgccagagctccggctgaagcaagaagtcctccagctgcgtcgtttgccgcctgtggacgagtgcgccccagtttctgccctggcagctcctggccacaccttctcagagctcacctgtgcacttctaaattgaattggcccacggtgtccaaccaagaaggagcatctgcactccgagaaagatgtgttctgtaactgccccagtgtgaccccgcagtggctctcggtgctagatatgcatgactaagattgatgctgggcaaaatgtagatgatctttcattatgttgtgggcagcgtctttctctgcctttgctatatgcagtcagcagtaagccttttgctaaaagagttttgtttgacttctgagatccaaggctgattgttgttaaaaaaaaaaaaaaaaaaaagtggcacatttaaaaaaatgtgtctgcatatgtggtgcatccttccatctccacaaaccatttgattcttgaaatattgtttgacctcattgctgtgtgtgaatatttctccacatgcttcagatgcacattcctagtctctgcttcctaaggggggaaccaccacacattggggggaaaaaagacattttcctacacccacccaccttgttgaaagggaggtaggtttggggcttcaggccaggcactgactatgaaacattagctgcagtgtgcaggacagctttgaggtccagctgaagtcaggaagcaaaacaaatgtagatgtcacttcaaacataatttcaactgtcaccagatcaactctacattcaaggagtgtggacgctgcagtgcagttgtgagggcagttagcagccgcctcttctgcatcctgtcaactctgattagttagagtttaggctcaaaagagttggtggactgagattgaaatttggttgtgcaagagaaaggaaaggagacacttagtaccaccagtttcagcaataaagaagggtcattctgtattcaaaattgtactgtagataaatcattcatgagattgtaaaaaatgtttgtcttgtgaccttgtgcttttgaagtcagacaaaaccgtgtaatcaacttgcacaaaaagagggtacacagtgaacatataaacacagacctaatcaaacaggagcagattcctcatggtgcttgtttattatatatatttaatcctgcttgacactttacccaagggagatggtcccttttatcagttgaatgttagcagcgttatttcagagtgtggtgactggttagagaaactcatgtactcaaccagccacagtttcaaacaaaatttttatgtgcaaaggacagcaaccttcttgtatgttaaaccaccagtacgctttgtacatctgtgataacgcctgttttatattcaaatgaacaaataaaagcttttattttt

SEQ ID NO: 69 - DNA, 8056 bp, Homo sapien
ggggggggagggaggtccctgcgcgcccgccgcccgcctcccgcgcccgcgccgccgcctcctcctcggtgcggttccgccgggcgcgaggagccgccgagacctccgcctgcgaacaaagaggaggccgtgcggggcgcggcgcccgcggagcatggcggaccgcagcctgggagggcatggcgctgcccctggaggtgcgggcgcgcctggccgagctggagctggagctgtcggaaggtgacatcacacaaaaaggatatgaaaagaagaggtcaaagttaattggagcctaccttccgcagcctccgacagcgaatggagctgccgtggttcggtgtagactgcagcacagtgaaggagcgccgaggagaacattccgctctgcccacatcggggtgtgcgacgtccgagaagctgcggctcgggagcgggtggccagcaccgcagggaaccggcctctgttttactttcgtttcggggtggaccaagctttgccgcaagaacgccgggctcctgtcactccttcctccgcctctcgctaccaccgccgacggtcttcagggtcacgagatgagcgctatcggtcagacgtccacacggaagctgtccaggcggctctggccaaacacaaagagcggaagatggcagtgcctatgccttccaaacgcaggtccctggtcgtgcagacctcgatggacgcctacacccctccagatacctcttctggctcagaagatgaaggctcagtgcagggggactcccagggcacccccacctccagccagggcagcatcaatatggagcactggatcagccaggccatccacggctccaccacgtccaccacctcctcgtcctctacgcagagcgggggcagcggggctgcccacaggctggcggacgtcatggctcagacccacatagaaaatcattctgcacctcctgacgtaaccacgtacacctcagagcactcgatacaggtggagagaccgcagggttccacggggtcccggacagcgcccaagtacggcaacgccgagctcatggagaccggggatggagtaccagtaagtagccgggtgtcagcaaaaatccagcagcttgtcaataccctcaaacgaccgaaacgaccacctttacgagaattctttgtcgatgactttgaagaattattagaagttcaacaaccggatccgaaccaaccaaagccggagggggcccagatgctggccatgcgcggagagcagctgggcgtggtcacgaactggccgccgtcgctggaggccgcactgcagaggtggggcaccatctcgcccaaggcgccctgcctgaccaccatggacaccaacgggaagcccctctacatcctcacttacggcaagctgtggacaagaagtatgaaggtcgcttacagcattctacacaaattaggcacaaagcaggaacccatggtccggcctggagatagggtggcactggtgttccccaacaatgatccggctgccttcatggcggctttctacggctgcctgctggccgaggtggtccccgtgcccatcgaggtgccactcaccaggaaggacgcagggagccagcagataggtttcttgcttggaagctgtggagttactgtagccttgactagtgacgcctgccataaaggacttccaaaaagcccaacgggagagatcccacagtttaaaggttggccaaagctgctgtggtttgtcacagagtctaaacatctctccaaaccgccccgagactggttcccacacattaaagatgccaataacgacactgcgtatattgagtacaagacgtgtaaggatggcagtgtgctgggtgtgacggtgacgaggactgcgctgctgacacactgccaggccctgacgcaggcgtgtggctacacggaagctgaaaccattgtgaatgtgctggatttcaagaaggacgtcgggctctggcatggcatcctgacaagcgtcatgaacatgatgcatgtgatcagcatcccgtactcgctgatgaaggtgaaccctctctcctggatccagaaggtctgccagtacaaagcaaaagtggcgtgtgtgaaatcgagggatatgcattgggcattagtagcacacagagatcagagagacatcaacctctcctctctgcgaatgctgatagtggcggacggcgcgaacccctggtctatttcttcttgcgatgcatttctcaatgtcttccaaagtaaaggccttcgacaggaggtcatctgtccttgtgccagctcgccagaggccctcactgtggccatccggaggcccacggatgacagtaaccagcccccgggccggggtgtcctctccatgcatggactgacctatggggtcattcgtgtggactcggaagagaagctgtccgtgctcaccgtgcaggatgtcggcctcgtgatgcctggagccatcatgtgttcagtgaagccagacggggttcctcagctgtgcagaacggatgagatcggggagctgtgtgtgtgtgcagttgcgacgggcacgtcctactatggcctctctggcatgaccaagaacacctttgaggtgtttcccatgacaagctccggggctccgatcagtgaatacccattcataaggacaggcttgctggggttcgtgggtcccggaggcctcgtcttcgtggtgggcaagatggatggcctcatggtggtcagcgggcgcaggcacaacgccgacgacatcgtggccactgcgctggccgtagaacccatgaagtttgtctaccggggaaggatagccgtgttctcggtgaccgtgctgcacgacgagaggatcgtgatcgtggctgagcagaggcctgactccacggaagaggacagtttccagtggatgagccgtgtgctgcaggcgattgacagtatacatcaagttggagtttattgcctggccttggtgccagcaaacaccctccccaaaaccccgcttggtgggatccatttatcagaaacaaaacagctttttctggagggctctctgcacccctgcaatgtcctaatgtgcccccacacctgcgtcacaaacttgcctaagcctcgacagaagcagccagaaatcggccctgcctctgtgatggtggggaacctggtctctgggaagagaatcgcccaggccagtggcagagacctgggtcagatcgaagataacgaccaggcacgcaagttcctgttcctctcagaggtcttgcagtggagagcacagaccaccccggaccacatcctctacacgctgctcaactgtcggggtgcgatagcgaactcgctgacctgcgtgcagctgcacaagagagctgagaagatcgccgtgatgctgatggagaggggccaccttcaggacggcgaccacgtggccttggtctaccccccaggaatagacctgatagcagcgttttatggttgcctgtacgcaggctgtgtgccaataaccgtccgtcccccgcacccacagaacatcgcgacgacgttgcctaccgtcaagatgattgtggaggtgagtcgctctgcctgtctgatgacgacacagctgatctgtaagttgctgcggtccagggaggcggcggcggctgtggacgtcaggacgtggcccctcatcctggacacagatgatttgccaaagaagcggcctgcccagatctgcaaaccttgcaacccagacactcttgcatatctcgacttcagcgtgtccacaactgggatgctagctggcgtaaagatgtctcacgcagccaccagtgccttctgccgttccattaagctgcagtgtgaactttacccctctagagaagtggccatctgcctggacccttactgtggactgggatttgtcctctggtgcctctgcagtgtgtattctgggcaccagtccatcctgatcccgccctctgagctggaaaccaaccccgccttgtggcttcttgccgtgagtcagtacaaagtccgagacacgttttgctcctactccgtgatggagctgtgcaccaaggggctgggctcgcaaacagagtccctcaaggcgcgagggctggacttgtcccgagtgaggacctgcgtggttgtggcggaagagaggcctcggatcgcactcacacagtcgttctcaaagctgtttaaggacctgggccttcacccgcgggccgtcagcacctcgttcggttgcagggtgaacctggcgatttgcttgcagggaacctcaggacctgacccaaccactgtctacgtggacatgagagccctgagacacgacagagtccgcttagtggaaagaggatcccctcatagtctgcccctgatggaatcgggaaagatacttccaggggttcggattataattgccaacccagaaacaaaaggaccgctgggggactcacaccttggagagatttgggttcacagtgcccacaatgccagcggttatttcactatttacggagacgaatccctccagtcagatcacttcaactcaagactaagttttggagacacccagaccatctgggcacgcacaggctacttggggttcctgcggagaactgagctcacagatgcaaatggagagcgccatgatgccctctacgtggtaggggcactggacgaagccatggagctgcggggcatgcggtaccacccaatcgacattgagacctcggtcatcagagcccataaaagcgttacggaatgtgctgtgtttacctggacaaatttgttggtggttgtggttgagctggatgggtcggaacaagaagccttggacctggttcccttggtgaccaacgtggtcctggaggagcactacctgatcgtcggagtggtggtcgtggtggacatcggcgtcatccccatcaactcccgtggggagaagcagcgcatgcacctgcgagacgggtttttggcagaccagctagaccccatctatgtggcctacaacatgtagtctcgtctcttggcttccatggacttttctagagatgtagacattgttctccgtgtccactgaagcgtgcagacacagggcaacactcaccagaatacagccatttgtggtgagagtggaggaggaagaggaggaggaagaggacttctcacagcagccacgattggcatgggggtgaaatgtgaatttaccactgaatttcgctcagaaggactttggattactgccttcagtttgttggaaaagcccatttcaaaaactttcttttcttttctttcttttttaattattggataataagtgctttcttcgtaaatgtggtattttgttaagccgaaatagcaattaaaaaaatatcctgccctccagatgggttcttttaaacaatttatgtagtgtgacaaagaattgttttctctgttttaatgtgtcatgaaatcttaatgacatggatctgttactaatttaagccattgctagatctcatccttttaggaaagtttgaggtacgagaaaaccttccaaatagcaccttccaattagataatagcagctttctttgtcagaaatgtgctgaagaaacaaaggctggtatacggccttcgaagttagtatagaatgagaagaaattataaataaggtgtatttcggcaattatcttgcaaatatctttgtactaaactaaaaagataaaataagttaacttcctcaatatgtaattatgtacaaaacgtttaatttattttgatctctttagaactataaaagagaaaaacattcaagaatattaaagtcttgtaatgtttgctaatataaaaaagtgttgtattatcttgcgtggatagtatcacaacaaatatatatatatgaaatataaattcactaatgaacaaaggagattttaaagtttaagatgcagaacttgtcacttgcatggtgtgccccccgtactcacatacactctgctgttgccagcagtcgcagaccgcaggagccctgtctaaaagtttcttctagaaccagagaccagcaagtgaaattattgccatctcaaggatggcaaaagaattcaaagctcaatgtgcactatttttttctttgctgtgggacaacagtgaatgtgtttatgccagcgtgtgctgatgatactgaggggctttaggttggcaaatagcactgttttcttagctgcaagaattcattgcacaatgtttttcatcatttttgttaatgtcatctttttttggtccttgctacgaaaaggaatgcgattctgtggtcattcgcactgggttgcattgattccccctctgatggccaatgtggagtggacaaagtgtccggaactcacatcggtgatcgtcccctcgtcttaagacccagcccgctctgtgtgagcctctggggctccctcgctcagtgagcacagttccccgggggttcatgccagagctccggctgaagcaagaagtcctccagctgcgtcgtttgccgcctgtggacgagtgcgccccagtttctgccctggcagctcctggccacaccttctcagagctcacctgtgcacttctaaattgaattggcccacggtgtccaaccaagaaggagcatctgcactccgagaaagatgtgttctgtaactgccccagtgtgaccccgcagtggctctcggtgctagatatgcatgactaagattgatgctgggcaaaatgtagatgatctttcattatgttgtgggcagcgtctttctctgcctttgctatatgcagtcagcagtaagccttttgctaaaagagttttgtttgacttctgagatccaaggctgattgttgttaaaaaaaaaaaaaaaaaaaagtggcacatttaaaaaaatgtgtctgcatatgtggtgcatccttccatctccacaaaccatttgattcttgaaatattgtttgacctcattgctgtgtgtgaatatttctccacatgcttcagatgcacattcctagtctctgcttcctaaggggggaaccaccacacattggggggaaaaaagacattttcctacacccacccaccttgttgaaagggaggtaggtttggggcttcaggccaggcactgactatgaaacattagctgcagtgtgcaggacagctttgaggtccagctgaagtcaggaagcaaaacaaatgtagatgtcacttcaaacataatttcaactgtcaccagatcaactctacattcaaggagtgtggacgctgcagtgcagttgtgagggcagttagcagccgcctcttctgcatcctgtcaactctgattagttagagtttaggctcaaaagagttggtggactgagattgaaatttggttgtgcaagagaaaggaaaggagacacttagtaccaccagtttcagcaaaaaatgtttgtcttgtgaccttgtgcttttgaagtcagacaaaaccgtgtaatcaacttgcacaaaaagagggtacacagtgaacatataaacacagacctaatcaaacaggagcagattcctcatggtgcttgtttattatatatatttaatcctgcttgacactttacccaagggagatggtcccttttatcagttgaatgttagcagcgttatttcagagtgtggtgactggttagagaaactcatgtactcaaccagccacagtttcaaacaaaatttttatgtgcaaaggacagcaaccttcttgtatgttaaaccaccagtacgctttgtacatctgtgataacgcctgttttatattcaaatgaacaaataaaagcttttatttttgttgctctgaaaatagcagtttcttaattggtcccctggaaagatgtctgggacagctttaatcccgggaaggaagtgactcctacagggaaatgtatctgactctgtttacataatttgttgcattacttagtacagataatcatactttgaaaaatgtttaaattttgatgtgggcatttattgctaaaaataattcctatggcaacaaatgttttgtgaaatgttttttttaattcttttaaatatatctaaatatatttgttcac

SEQ ID NO: 70 - DNA, 7580 bp, Homo sapien
cagagctggggtcaagcaggtgtggccctgaggctcctcccagcatgaccagcagaacagcacatcctggaacgtggtagacattcgggtccgatgtatctctgtccggtctcctgcctagccacggggctaccgtacagcatgatcacctcgggcccttcccaggatcgcatctaggatgcagcctgttgtagccgcgctggggagggggctgtgggactgtgggactgtgggtgctcattgaagctgtgatgatcgctttccccacccgctgattcctgtttttcaggagtaccagtaagtagccgggtgtcagcaaaaatccagcagcttgtcaataccctcaaacgaccgaaacgaccacctttacgagaattctttgtcgatgactttgaagaattattagaagttcaacaaccggatccgaaccaaccaaagccggagggggcccagatgctggccatgcgcggagagcagctgggcgtggtcacgaactggccgccgtcgctggaggccgcactgcagaggtggggcaccatctcgcccaaggcgccctgcctgaccaccatggacaccaacgggaagcccctctacatcctcacttacggcaagctgtggacaagaagtatgaaggtcgcttacagcattctacacaaattaggcacaaagcaggaacccatggtccggcctggagatagggtggcactggtgttccccaacaatgatccggctgccttcatggcggctttctacggctgcctgctggccgaggtggtccccgtgcccatcgaggtgccactcaccaggaaggacgcagggagccagcagataggtttcttgcttggaagctgtggagttactgtagccttgactagtgacgcctgccataaaggacttccaaaaagcccaacgggagagatcccacagtttaaaggttggccaaagctgctgtggtttgtcacagagtctaaacatctctccaaaccgccccgagactggttcccacacattaaagatgccaataacgacactgcgtatattgagtacaagacgtgtaaggatggcagtgtgctgggtgtgacggtgacgaggactgcgctgctgacacactgccaggccctgacgcaggcgtgtggctacacggaagctgaaaccattgtgaatgtgctggatttcaagaaggacgtcgggctctggcatggcatcctgacaagcgtcatgaacatgatgcatgtgatcagcatcccgtactcgctgatgaaggtgaaccctctctcctggatccagaaggtctgccagtacaaagcaaaagtggcgtgtgtgaaatcgagggatatgcattgggcattagtagcacacagagatcagagagacatcaacctctcctctctgcgaatgctgatagtggcggacggcgcgaacccctggtctatttcttcttgcgatgcatttctcaatgtcttccaaagtaaaggccttcgacaggaggtcatctgtccttgtgccagctcgccagaggccctcactgtggccatccggaggcccacggatgacagtaaccagcccccgggccggggtgtcctctccatgcatggactgacctatggggtcattcgtgtggactcggaagagaagctgtccgtgctcaccgtgcaggatgtcggcctcgtgatgcctggagccatcatgtgttcagtgaagccagacggggttcctcagctgtgcagaacggatgagatcggggagctgtgtgtgtgtgcagttgcgacgggcacgtcctactatggcctctctggcatgaccaagaacacctttgaggtgtttcccatgacaagctccggggctccgatcagtgaatacccattcataaggacaggcttgctggggttcgtgggtcccggaggcctcgtcttcgtggtgggcaagatggatggcctcatggtggtcagcgggcgcaggcacaacgccgacgacatcgtggccactgcgctggccgtagaacccatgaagtttgtctaccggggaaggatagccgtgttctcggtgaccgtgctgcacgacgagaggatcgtgatcgtggctgagcagaggcctgactccacggaagaggacagtttccagtggatgagccgtgtgctgcaggttgccctccctcgccctgggcactggtcccctgtgtcttgtttctggcctccttacttcattcagatcatggtgtgaccagctgttgctttgcccatggggtggccctttttcccttcccttcatttgatcaggaactacatcaagtgtccagaaactagctcagcagatcgagggtgtagggaccaggaatttgcacagctggttcctaccggacaccttggggaggtcgaagtaagctttttgtttgatcttgagaacatgttatcttttctccaaagttccttttttactgtgtatggtcttccacaagccctgggtaacattattcagctttggtgagtttagtaggaaaatcctttctcttaccttggcatttttatgctgggaacagtgcttatactgcacagacttctgtgtattgtggatcatattttgcataatataaatacgtactgtttatacttcctcttataacatgatttcctctttattaactttctaggcgattgacagtatacatcaagttggagtttattgcctggccttggtgccagcaaacaccctccccaaaaccccgcttggtgggatccatttatcagaaacaaaacagctttttctggagggctctctgcacccctgcaatgtcctaatgtgcccccacacctgcgtcacaaacttgcctaagcctcgacagaagcagccagaaatcggccctgcctctgtgatggtggggaacctggtctctgggaagagaatcgcccaggccagtggcagagacctgggtcagatcgaagataacgaccaggcacgcaagttcctgttcctctcagaggtcttgcagtggagagcacagaccaccccggaccacatcctctacacgctgctcaactgtcggggtgcgatagcgaactcgctgacctgcgtgcagctgcacaagagagctgagaagatcgccgtgatgctgatggagaggggccaccttcaggacggcgaccacgtggccttggtctaccccccaggaatagacctgatagcagcgttttatggttgcctgtacgcaggctgtgtgccaataaccgtccgtcccccgcacccacagaacatcgcgacgacgttgcctaccgtcaagatgattgtggaggtgagtcgctctgcctgtctgatgacgacacagctgatctgtaagttgctgcggtccagggaggcggcggcggctgtggacgtcaggacgtggcccctcatcctggacacagatgatttgccaaagaagcggcctgcccagatctgcaaaccttgcaacccagacactcttgcatatctcgacttcagcgtgtccacaactgggatgctagctggcgtaaagatgtctcacgcagccaccagtgccttctgccgttccattaagctgcagtgtgaactttacccctctagagaagtggccatctgcctggacccttactgtggactgggatttgtcctctggtgcctctgcagtgtgtattctgggcaccagtccatcctgatcccgccctctgagctggaaaccaaccccgccttgtggcttcttgccgtgagtcagtacaaagtccgagacacgttttgctcctactccgtgatggagctgtgcaccaaggggctgggctcgcaaacagagtccctcaaggcgcgagggctggacttgtcccgagtgaggacctgcgtggttgtggcggaagagaggcctcggatcgcactcacacagtcgttctcaaagctgtttaaggacctgggccttcacccgcgggccgtcagcacctcgttcggttgcagggtgaacctggcgatttgcttgcagggaacctcaggacctgacccaaccactgtctacgtggacatgagagccctgagacacgacagagtccgcttagtggaaagaggatcccctcatagtctgcccctgatggaatcgggaaagatacttccaggggttcggattataattgccaacccagaaacaaaaggaccgctgggggactcacaccttggagagatttgggttcacagtgcccacaatgccagcggttatttcactatttacggagacgaatccctccagtcagatcacttcaactcaagactaagttttggagacacccagaccatctgggcacgcacaggctacttggggttcctgcggagaactgagctcacagatgcaaatggagagcgccatgatgccctctacgtggtaggggcactggacgaagccatggagctgcggggcatgcggtaccacccaatcgacattgagacctcggtcatcagagcccataaaagcgttacggaatgtgctgtgtttacctggacaaatttgttggtggttgtggttgagctggatgggtcggaacaagaagccttggacctggttcccttggtgaccaacgtggtcctggaggagcactacctgatcgtcggagtggtggtcgtggtggacatcggcgtcatccccatcaactcccgtggggagaagcagcgcatgcacctgcgagacgggtttttggcagaccagctagaccccatctatgtggcctacaacatgtagtctcgtctcttggcttccatggacttttctagagatgtagacattgttctccgtgtccactgaagcgtgcagacacagggcaacactcaccagaatacagccatttgtggtgagagtggaggaggaagaggaggaggaagaggacttctcacagcagccacgattggcatgggggtgaaatgtgaatttaccactgaatttcgctcagaaggactttggattactgccttcagtttgttggaaaagcccatttcaaaaactttcttttcttttctttcttttttaattattggataataagtgctttcttcgtaaatgtggtattttgttaagccgaaatagcaattaaaaaaatatcctgccctccagatgggttcttttaaacaatttatgtagtgtgacaaagaattgttttctctgttttaatgtgtcatgaaatcttaatgacatggatctgttactaatttaagccattgctagatctcatccttttaggaaagtttgaggtacgagaaaaccttccaaatagcaccttccaattagataatagcagctttctttgtcagaaatgtgctgaagaaacaaaggctggtatacggccttcgaagttagtatagaatgagaagaaattataaataaggtgtatttcggcaattatcttgcaaatatctttgtactaaactaaaaagataaaataagttaacttcctcaatatgtaattatgtacaaaacgtttaatttattttgatctctttagaactataaaagagaaaaacattcaagaatattaaagtcttgtaatgtttgctaatataaaaaagtgttgtattatcttgcgtggatagtatcacaacaaatatatatatatgaaatataaattcactaatgaacaaaggagattttaaagtttaagatgcagaacttgtcacttgcatggtgtgccccccgtactcacatacactctgctgttgccagcagtcgcagaccgcaggagccctgtctaaaagtttcttctagaaccagagaccagcaagtgaaattattgccatctcaaggatggcaaaagaattcaaagctcaatgtgcactatttttttctttgctgtgggacaacagtgaatgtgtttatgccagcgtgtgctgatgatactgaggggctttaggttggcaaatagcactgttttcttagctgcaagaattcattgcacaatgtttttcatcatttttgttaatgtcatctttttttggtccttgctacgaaaaggaatgcgattctgtggtcattcgcactgggttgcattgattccccctctgatggccaatgtggagtggacaaagtgtccggaactcacatcggtgatcgtcccctcgtcttaagacccagcccgctctgtgtgagcctctggggctccctcgctcagtgagcacagttccccgggggttcatgccagagctccggctgaagcaagaagtcctccagctgcgtcgtttgccgcctgtggacgagtgcgccccagtttctgccctggcagctcctggccacaccttctcagagctcacctgtgcacttctaaattgaattggcccacggtgtccaaccaagaaggagcatctgcactccgagaaagatgtgttctgtaactgccccagtgtgaccccgcagtggctctcggtgctagatatgcatgactaagattgatgctgggcaaaatgtagatgatctttcattatgttgtgggcagcgtctttctctgcctttgctatatgcagtcagcagtaagccttttgctaaaagagttttgtttgacttctgagatccaaggctgattgttgttaaaaaaaaaaaaaaaaaaaagtggcacatttaaaaaaatgtgtctgcatatgtggtgcatccttccatctccacaaaccatttgattcttgaaatattgtttgacctcattgctgtgtgtgaatatttctccacatgcttcagatgcacattcctagtctctgcttcctaaggggggaaccaccacacattggggggaaaaaagacattttcctacacccacccaccttgttgaaagggaggtaggtttggggcttcaggccaggcactgactatgaaacattagctgcagtgtgcaggacagctttgaggtccagctgaagtcaggaagcaaaacaaatgtagatgtcacttcaaacataatttcaactgtcaccagatcaactctacattcaaggagtgtggacgctgcagtgcagttgtgagggcagttagcagccgcctcttctgcatcctgtcaactctgattagttagagtttaggctcaaaagagttggtggactgagattgaaatttggttgtgcaagagaaaggaaaggagacacttagtaccaccagtttcagcaataaagaagggtcattctgtattcaaaattgtactgtagataaatcattcatgagattgtaaaaaatgtttgtcttgtgaccttgtgcttttgaagtcagacaaaaccgtgtaatcaacttgcacaaaaagagggtacacagtgaacatataaacacagacctaatcaaacaggagcagattcctcatggtgcttgtttattatatatatttaatcctgcttgacactttacccaagggagatggtcccttttatcagttgaatgttagcagcgttatttcagagtgtggtgactggttagagaaactcatgtactcaaccagccacagtttcaaacaaaatttttatgtgcaaaggacagcaaccttcttgtatgttaaaccaccagtacgctttgtacatctgtgataacgcctgttttatattcaaatgaacaaataaaagcttttattttt

SEQ ID NO: 71 - DNA, 6803 bp, Homo sapien
cataccccgaaaatgttggtagtacccaggaaggacgcagggagccagcagataggtttcttgcttggaagctgtggagttactgtagccttgactagtgacgcctgccataaaggacttccaaaaagcccaacgggagagatcccacagtttaaaggttggccaaagctgctgtggtttgtcacagagtctaaacatctctccaaaccgccccgagactggttcccacacattaaagatgccaataacgacactgcgtatattgagtacaagacgtgtaaggatggcagtgtgctgggtgtgacggtgacgaggactgcgctgctgacacactgccaggccctgacgcaggcgtgtggctacacggaagctgaaaccattgtgaatgtgctggatttcaagaaggacgtcgggctctggcatggcatcctgacaagcgtcatgaacatgatgcatgtgatcagcatcccgtactcgctgatgaaggtgaaccctctctcctggatccagaaggtctgccagtacaaagcaaaagtggcgtgtgtgaaatcgagggatatgcattgggcattagtagcacacagagatcagagagacatcaacctctcctctctgcgaatgctgatagtggcggacggcgcgaacccctggtctatttcttcttgcgatgcatttctcaatgtcttccaaagtaaaggccttcgacaggaggtcatctgtccttgtgccagctcgccagaggccctcactgtggccatccggaggcccacggatgacagtaaccagcccccgggccggggtgtcctctccatgcatggactgacctatggggtcattcgtgtggactcggaagagaagctgtccgtgctcaccgtgcaggatgtcggcctcgtgatgcctggagccatcatgtgttcagtgaagccagacggggttcctcagctgtgcagaacggatgagatcggggagctgtgtgtgtgtgcagttgcgacgggcacgtcctactatggcctctctggcatgaccaagaacacctttgaggtgtttcccatgacaagctccggggctccgatcagtgaatacccattcataaggacaggcttgctggggttcgtgggtcccggaggcctcgtcttcgtggtgggcaagatggatggcctcatggtggtcagcgggcgcaggcacaacgccgacgacatcgtggccactgcgctggccgtagaacccatgaagtttgtctaccggggaaggatagccgtgttctcggtgaccgtgctgcacgacgagaggatcgtgatcgtggctgagcagaggcctgactccacggaagaggacagtttccagtggatgagccgtgtgctgcaggttgccctccctcgccctgggcactggtcccctgtgtcttgtttctggcctccttacttcattcagatcatggtgtgaccagctgttgctttgcccatggggtggccctttttcccttcccttcatttgatcaggaactacatcaagtgtccagaaactagctcagcagatcgagggtgtagggaccaggaatttgcacagctggttcctaccggacaccttggggaggtcgaagtaagctttttgtttgatcttgagaacatgttatcttttctccaaagttccttttttactgtgtatggtcttccacaagccctgggtaacattattcagctttggtgagtttagtaggaaaatcctttctcttaccttggcatttttatgctgggaacagtgcttatactgcacagacttctgtgtattgtggatcatattttgcataatataaatacgtactgtttatacttcctcttataacatgatttcctctttattaactttctaggcgattgacagtatacatcaagttggagtttattgcctggccttggtgccagcaaacaccctccccaaaaccccgcttggtgggatccatttatcagaaacaaaacagctttttctggagggctctctgcacccctgcaatgtcctaatgtgcccccacacctgcgtcacaaacttgcctaagcctcgacagaagcagccagaaatcggccctgcctctgtgatggtggggaacctggtctctgggaagagaatcgcccaggccagtggcagagacctgggtcagatcgaagataacgaccaggcacgcaagttcctgttcctctcagaggtcttgcagtggagagcacagaccaccccggaccacatcctctacacgctgctcaactgtcggggtgcgatagcgaactcgctgacctgcgtgcagctgcacaagagagctgagaagatcgccgtgatgctgatggagaggggccaccttcaggacggcgaccacgtggccttggtctaccccccaggaatagacctgatagcagcgttttatggttgcctgtacgcaggctgtgtgccaataaccgtccgtcccccgcacccacagaacatcgcgacgacgttgcctaccgtcaagatgattgtggaggtgagtcgctctgcctgtctgatgacgacacagctgatctgtaagttgctgcggtccagggaggcggcggcggctgtggacgtcaggacgtggcccctcatcctggacacagatgatttgccaaagaagcggcctgcccagatctgcaaaccttgcaacccagacactcttgcatatctcgacttcagcgtgtccacaactgggatgctagctggcgtaaagatgtctcacgcagccaccagtgccttctgccgttccattaagctgcagtgtgaactttacccctctagagaagtggccatctgcctggacccttactgtggactgggatttgtcctctggtgcctctgcagtgtgtattctgggcaccagtccatcctgatcccgccctctgagctggaaaccaaccccgccttgtggcttcttgccgtgagtcagtacaaagtccgagacacgttttgctcctactccgtgatggagctgtgcaccaaggggctgggctcgcaaacagagtccctcaaggcgcgagggctggacttgtcccgagtgaggacctgcgtggttgtggcggaagagaggcctcggatcgcactcacacagtcgttctcaaagctgtttaaggacctgggccttcacccgcgggccgtcagcacctcgttcggttgcagggtgaacctggcgatttgcttgcagggaacctcaggacctgacccaaccactgtctacgtggacatgagagccctgagacacgacagagtccgcttagtggaaagaggatcccctcatagtctgcccctgatggaatcgggaaagatacttccaggggttcggattataattgccaacccagaaacaaaaggaccgctgggggactcacaccttggagagatttgggttcacagtgcccacaatgccagcggttatttcactatttacggagacgaatccctccagtcagatcacttcaactcaagactaagttttggagacacccagaccatctgggcacgcacaggctacttggggttcctgcggagaactgagctcacagatgcaaatggagagcgccatgatgccctctacgtggtaggggcactggacgaagccatggagctgcggggcatgcggtaccacccaatcgacattgagacctcggtcatcagagcccataaaagcgttacggaatgtgctgtgtttacctggacaaatttgttggtggttgtggttgagctggatgggtcggaacaagaagccttggacctggttcccttggtgaccaacgtggtcctggaggagcactacctgatcgtcggagtggtggtcgtggtggacatcggcgtcatccccatcaactcccgtggggagaagcagcgcatgcacctgcgagacgggtttttggcagaccagctagaccccatctatgtggcctacaacatgtagtctcgtctcttggcttccatggacttttctagagatgtagacattgttctccgtgtccactgaagcgtgcagacacagggcaacactcaccagaatacagccatttgtggtgagagtggaggaggaagaggaggaggaagaggacttctcacagcagccacgattggcatgggggtgaaatgtgaatttaccactgaatttcgctcagaaggactttggattactgccttcagtttgttggaaaagcccatttcaaaaactttcttttcttttctttcttttttaattattggataataagtgctttcttcgtaaatgtggtattttgttaagccgaaatagcaattaaaaaaatatcctgccctccagatgggttcttttaaacaatttatgtagtgtgacaaagaattgttttctctgttttaatgtgtcatgaaatcttaatgacatggatctgttactaatttaagccattgctagatctcatccttttaggaaagtttgaggtacgagaaaaccttccaaatagcaccttccaattagataatagcagctttctttgtcagaaatgtgctgaagaaacaaaggctggtatacggccttcgaagttagtatagaatgagaagaaattataaataaggtgtatttcggcaattatcttgcaaatatctttgtactaaactaaaaagataaaataagttaacttcctcaatatgtaattatgtacaaaacgtttaatttattttgatctctttagaactataaaagagaaaaacattcaagaatattaaagtcttgtaatgtttgctaatataaaaaagtgttgtattatcttgcgtggatagtatcacaacaaatatatatatatgaaatataaattcactaatgaacaaaggagattttaaagtttaagatgcagaacttgtcacttgcatggtgtgccccccgtactcacatacactctgctgttgccagcagtcgcagaccgcaggagccctgtctaaaagtttcttctagaaccagagaccagcaagtgaaattattgccatctcaaggatggcaaaagaattcaaagctcaatgtgcactatttttttctttgctgtgggacaacagtgaatgtgtttatgccagcgtgtgctgatgatactgaggggctttaggttggcaaatagcactgttttcttagctgcaagaattcattgcacaatgtttttcatcatttttgttaatgtcatctttttttggtccttgctacgaaaaggaatgcgattctgtggtcattcgcactgggttgcattgattccccctctgatggccaatgtggagtggacaaagtgtccggaactcacatcggtgatcgtcccctcgtcttaagacccagcccgctctgtgtgagcctctggggctccctcgctcagtgagcacagttccccgggggttcatgccagagctccggctgaagcaagaagtcctccagctgcgtcgtttgccgcctgtggacgagtgcgccccagtttctgccctggcagctcctggccacaccttctcagagctcacctgtgcacttctaaattgaattggcccacggtgtccaaccaagaaggagcatctgcactccgagaaagatgtgttctgtaactgccccagtgtgaccccgcagtggctctcggtgctagatatgcatgactaagattgatgctgggcaaaatgtagatgatctttcattatgttgtgggcagcgtctttctctgcctttgctatatgcagtcagcagtaagccttttgctaaaagagttttgtttgacttctgagatccaaggctgattgttgttaaaaaaaaaaaaaaaaaaaagtggcacatttaaaaaaatgtgtctgcatatgtggtgcatccttccatctccacaaaccatttgattcttgaaatattgtttgacctcattgctgtgtgtgaatatttctccacatgcttcagatgcacattcctagtctctgcttcctaaggggggaaccaccacacattggggggaaaaaagacattttcctacacccacccaccttgttgaaagggaggtaggtttggggcttcaggccaggcactgactatgaaacattagctgcagtgtgcaggacagctttgaggtccagctgaagtcaggaagcaaaacaaatgtagatgtcacttcaaacataatttcaactgtcaccagatcaactctacattcaaggagtgtggacgctgcagtgcagttgtgagggcagttagcagccgcctcttctgcatcctgtcaactctgattagttagagtttaggctcaaaagagttggtggactgagattgaaatttggttgtgcaagagaaaggaaaggagacacttagtaccaccagtttcagcaataaagaagggtcattctgtattcaaaattgtactgtagataaatcattcatgagattgtaaaaaatgtttgtcttgtgaccttgtgcttttgaagtcagacaaaaccgtgtaatcaacttgcacaaaaagagggtacacagtgaacatataaacacagacctaatcaaacaggagcagattcctcatggtgcttgtttattatatatatttaatcctgcttgacactttacccaagggagatggtcccttttatcagttgaatgttagcagcgttatttcagagtgtggtgactggttagagaaactcatgtactcaaccagccacagtttcaaacaaaatttttatgtgcaaaggacagcaaccttcttgtatgttaaaccaccagtacgctttgtacatctgtgataacgcctgttttatattcaaatgaacaaataaaagcttttattttt

SEQ ID NO: 72 - DNA, 6797 bp, Homo sapien
gagagctgcttctcctcagggcccgtgcagcctggtgtccgtggcactctctgagacctgctgctcttccgggcccttgcagcctggtgtctgtggtgctccttgagaactgctgctcctcctggcccgtgcagcctggtgtccgcggcgctccctgagagctgcttctcctcctccttccctgggggcctgtgcagtctggtgtccatggcactcactgagagctgctcctccactatgcccctctgtatttgccatccctgccagccccaccctgaggagcctccaggggcctgtgtgcatggtgtctgcagcgctccctgagagctcccccctgcccgtgcggcctagtgtccatgccactgggtgagagctgctcctctgcgtgcccctccatgctcaccctgcgtgttcctttgttgattgcagagcgtcatgaacatgatgcatgtgatcagcatcccgtactcgctgatgaaggtgaaccctctctcctggatccagaaggtctgccagtacaaagcaaaagtggcgtgtgtgaaatcgagggatatgcattgggcattagtagcacacagagatcagagagacatcaacctctcctctctgcgaatgctgatagtggcggacggcgcgaacccctggtctatttcttcttgcgatgcatttctcaatgtcttccaaagtaaaggccttcgacaggaggtcatctgtccttgtgccagctcgccagaggccctcactgtggccatccggaggcccacggatgacagtaaccagcccccgggccggggtgtcctctccatgcatggactgacctatggggtcattcgtgtggactcggaagagaagctgtccgtgctcaccgtgcaggatgtcggcctcgtgatgcctggagccatcatgtgttcagtgaagccagacggggttcctcagctgtgcagaacggatgagatcggggagctgtgtgtgtgtgcagttgcgacgggcacgtcctactatggcctctctggcatgaccaagaacacctttgaggtgtttcccatgacaagctccggggctccgatcagtgaatacccattcataaggacaggcttgctggggttcgtgggtcccggaggcctcgtcttcgtggtgggcaagatggatggcctcatggtggtcagcgggcgcaggcacaacgccgacgacatcgtggccactgcgctggccgtagaacccatgaagtttgtctaccggggaaggatagccgtgttctcggtgaccgtgctgcacgacgagaggatcgtgatcgtggctgagcagaggcctgactccacggaagaggacagtttccagtggatgagccgtgtgctgcaggttgccctccctcgccctgggcactggtcccctgtgtcttgtttctggcctccttacttcattcagatcatggtgtgaccagctgttgctttgcccatggggtggccctttttcccttcccttcatttgatcaggaactacatcaagtgtccagaaactagctcagcagatcgagggtgtagggaccaggaatttgcacagctggttcctaccggacaccttggggaggtcgaagtaagctttttgtttgatcttgagaacatgttatcttttctccaaagttccttttttactgtgtatggtcttccacaagccctgggtaacattattcagctttggtgagtttagtaggaaaatcctttctcttaccttggcatttttatgctgggaacagtgcttatactgcacagacttctgtgtattgtggatcatattttgcataatataaatacgtactgtttatacttcctcttataacatgatttcctctttattaactttctaggcgattgacagtatacatcaagttggagtttattgcctggccttggtgccagcaaacaccctccccaaaaccccgcttggtgggatccatttatcagaaacaaaacagctttttctggagggctctctgcacccctgcaatgtcctaatgtgcccccacacctgcgtcacaaacttgcctaagcctcgacagaagcagccagaaatcggccctgcctctgtgatggtggggaacctggtctctgggaagagaatcgcccaggccagtggcagagacctgggtcagatcgaagataacgaccaggcacgcaagttcctgttcctctcagaggtcttgcagtggagagcacagaccaccccggaccacatcctctacacgctgctcaactgtcggggtgcgatagcgaactcgctgacctgcgtgcagctgcacaagagagctgagaagatcgccgtgatgctgatggagaggggccaccttcaggacggcgaccacgtggccttggtctaccccccaggaatagacctgatagcagcgttttatggttgcctgtacgcaggctgtgtgccaataaccgtccgtcccccgcacccacagaacatcgcgacgacgttgcctaccgtcaagatgattgtggaggtgagtcgctctgcctgtctgatgacgacacagctgatctgtaagttgctgcggtccagggaggcggcggcggctgtggacgtcaggacgtggcccctcatcctggacacagatgatttgccaaagaagcggcctgcccagatctgcaaaccttgcaacccagacactcttgcatatctcgacttcagcgtgtccacaactgggatgctagctggcgtaaagatgtctcacgcagccaccagtgccttctgccgttccattaagctgcagtgtgaactttacccctctagagaagtggccatctgcctggacccttactgtggactgggatttgtcctctggtgcctctgcagtgtgtattctgggcaccagtccatcctgatcccgccctctgagctggaaaccaaccccgccttgtggcttcttgccgtgagtcagtacaaagtccgagacacgttttgctcctactccgtgatggagctgtgcaccaaggggctgggctcgcaaacagagtccctcaaggcgcgagggctggacttgtcccgagtgaggacctgcgtggttgtggcggaagagaggcctcggatcgcactcacacagtcgttctcaaagctgtttaaggacctgggccttcacccgcgggccgtcagcacctcgttcggttgcagggtgaacctggcgatttgcttgcagggaacctcaggacctgacccaaccactgtctacgtggacatgagagccctgagacacgacagagtccgcttagtggaaagaggatcccctcatagtctgcccctgatggaatcgggaaagatacttccaggggttcggattataattgccaacccagaaacaaaaggaccgctgggggactcacaccttggagagatttgggttcacagtgcccacaatgccagcggttatttcactatttacggagacgaatccctccagtcagatcacttcaactcaagactaagttttggagacacccagaccatctgggcacgcacaggctacttggggttcctgcggagaactgagctcacagatgcaaatggagagcgccatgatgccctctacgtggtaggggcactggacgaagccatggagctgcggggcatgcggtaccacccaatcgacattgagacctcggtcatcagagcccataaaagcgttacggaatgtgctgtgtttacctggacaaatttgttggtggttgtggttgagctggatgggtcggaacaagaagccttggacctggttcccttggtgaccaacgtggtcctggaggagcactacctgatcgtcggagtggtggtcgtggtggacatcggcgtcatccccatcaactcccgtggggagaagcagcgcatgcacctgcgagacgggtttttggcagaccagctagaccccatctatgtggcctacaacatgtagtctcgtctcttggcttccatggacttttctagagatgtagacattgttctccgtgtccactgaagcgtgcagacacagggcaacactcaccagaatacagccatttgtggtgagagtggaggaggaagaggaggaggaagaggacttctcacagcagccacgattggcatgggggtgaaatgtgaatttaccactgaatttcgctcagaaggactttggattactgccttcagtttgttggaaaagcccatttcaaaaactttcttttcttttctttcttttttaattattggataataagtgctttcttcgtaaatgtggtattttgttaagccgaaatagcaattaaaaaaatatcctgccctccagatgggttcttttaaacaatttatgtagtgtgacaaagaattgttttctctgttttaatgtgtcatgaaatcttaatgacatggatctgttactaatttaagccattgctagatctcatccttttaggaaagtttgaggtacgagaaaaccttccaaatagcaccttccaattagataatagcagctttctttgtcagaaatgtgctgaagaaacaaaggctggtatacggccttcgaagttagtatagaatgagaagaaattataaataaggtgtatttcggcaattatcttgcaaatatctttgtactaaactaaaaagataaaataagttaacttcctcaatatgtaattatgtacaaaacgtttaatttattttgatctctttagaactataaaagagaaaaacattcaagaatattaaagtcttgtaatgtttgctaatataaaaaagtgttgtattatcttgcgtggatagtatcacaacaaatatatatatatgaaatataaattcactaatgaacaaaggagattttaaagtttaagatgcagaacttgtcacttgcatggtgtgccccccgtactcacatacactctgctgttgccagcagtcgcagaccgcaggagccctgtctaaaagtttcttctagaaccagagaccagcaagtgaaattattgccatctcaaggatggcaaaagaattcaaagctcaatgtgcactatttttttctttgctgtgggacaacagtgaatgtgtttatgccagcgtgtgctgatgatactgaggggctttaggttggcaaatagcactgttttcttagctgcaagaattcattgcacaatgtttttcatcatttttgttaatgtcatctttttttggtccttgctacgaaaaggaatgcgattctgtggtcattcgcactgggttgcattgattccccctctgatggccaatgtggagtggacaaagtgtccggaactcacatcggtgatcgtcccctcgtcttaagacccagcccgctctgtgtgagcctctggggctccctcgctcagtgagcacagttccccgggggttcatgccagagctccggctgaagcaagaagtcctccagctgcgtcgtttgccgcctgtggacgagtgcgccccagtttctgccctggcagctcctggccacaccttctcagagctcacctgtgcacttctaaattgaattggcccacggtgtccaaccaagaaggagcatctgcactccgagaaagatgtgttctgtaactgccccagtgtgaccccgcagtggctctcggtgctagatatgcatgactaagattgatgctgggcaaaatgtagatgatctttcattatgttgtgggcagcgtctttctctgcctttgctatatgcagtcagcagtaagccttttgctaaaagagttttgtttgacttctgagatccaaggctgattgttgttaaaaaaaaaaaaaaaaaaaagtggcacatttaaaaaaatgtgtctgcatatgtggtgcatccttccatctccacaaaccatttgattcttgaaatattgtttgacctcattgctgtgtgtgaatatttctccacatgcttcagatgcacattcctagtctctgcttcctaaggggggaaccaccacacattggggggaaaaaagacattttcctacacccacccaccttgttgaaagggaggtaggtttggggcttcaggccaggcactgactatgaaacattagctgcagtgtgcaggacagctttgaggtccagctgaagtcaggaagcaaaacaaatgtagatgtcacttcaaacataatttcaactgtcaccagatcaactctacattcaaggagtgtggacgctgcagtgcagttgtgagggcagttagcagccgcctcttctgcatcctgtcaactctgattagttagagtttaggctcaaaagagttggtggactgagattgaaatttggttgtgcaagagaaaggaaaggagacacttagtaccaccagtttcagcaataaagaagggtcattctgtattcaaaattgtactgtagataaatcattcatgagattgtaaaaaatgtttgtcttgtgaccttgtgcttttgaagtcagacaaaaccgtgtaatcaacttgcacaaaaagagggtacacagtgaacatataaacacagacctaatcaaacaggagcagattcctcatggtgcttgtttattatatatatttaatcctgcttgacactttacccaagggagatggtcccttttatcagttgaatgttagcagcgttatttcagagtgtggtgactggttagagaaactcatgtactcaaccagccacagtttcaaacaaaatttttatgtgcaaaggacagcaaccttcttgtatgttaaaccaccagtacgctttgtacatctgtgataacgcctgttttatattcaaatgaacaaataaaagcttttattttt

SEQ ID NO: 73 - DNA, 4679 bp, Homo sapien
ttggttgcacaggtctgtgcttgttctaaaaaccagtgatgtatgctttgcgccagtgagttgtatgacgcgtgcgcgctctctgcaagctgctctgctgaaggaatcttatgtgcttgtccctgtgatcggcccgcagggtgcgatagcgaactcgctgacctgcgtgcagctgcacaagagagctgagaagatcgccgtgatgctgatggagaggggccaccttcaggacggcgaccacgtggccttggtctaccccccaggaatagacctgatagcagcgttttatggttgcctgtacgcaggctgtgtgccaataaccgtccgtcccccgcacccacagaacatcgcgacgacgttgcctaccgtcaagatgattgtggaggtgagtcgctctgcctgtctgatgacgacacagctgatctgtaagttgctgcggtccagggaggcggcggcggctgtggacgtcaggacgtggcccctcatcctggacacagatgatttgccaaagaagcggcctgcccagatctgcaaaccttgcaacccagacactcttgcatatctcgacttcagcgtgtccacaactgggatgctagctggcgtaaagatgtctcacgcagccaccagtgccttctgccgttccattaagctgcagtgtgaactttacccctctagagaagtggccatctgcctggacccttactgtggactgggatttgtcctctggtgcctctgcagtgtgtattctgggcaccagtccatcctgatcccgccctctgagctggaaaccaaccccgccttgtggcttcttgccgtgagtcagtacaaagtccgagacacgttttgctcctactccgtgatggagctgtgcaccaaggggctgggctcgcaaacagagtccctcaaggcgcgagggctggacttgtcccgagtgaggacctgcgtggttgtggcggaagagaggcctcggatcgcactcacacagtcgttctcaaagctgtttaaggacctgggccttcacccgcgggccgtcagcacctcgttcggttgcagggtgaacctggcgatttgcttgcagggaacctcaggacctgacccaaccactgtctacgtggacatgagagccctgagacacgacagagtccgcttagtggaaagaggatcccctcatagtctgcccctgatggaatcgggaaagatacttccaggggttcggattataattgccaacccagaaacaaaaggaccgctgggggactcacaccttggagagatttgggttcacagtgcccacaatgccagcggttatttcactatttacggagacgaatccctccagtcagatcacttcaactcaagactaagttttggagacacccagaccatctgggcacgcacaggctacttggggttcctgcggagaactgagctcacagatgcaaatggagagcgccatgatgccctctacgtggtaggggcactggacgaagccatggagctgcggggcatgcggtaccacccaatcgacattgagacctcggtcatcagagcccataaaagcgttacggaatgtgctgtgtttacctggacaaatttgttggtggttgtggttgagctggatgggtcggaacaagaagccttggacctggttcccttggtgaccaacgtggtcctggaggagcactacctgatcgtcggagtggtggtcgtggtggacatcggcgtcatccccatcaactcccgtggggagaagcagcgcatgcacctgcgagacgggtttttggcagaccagctagaccccatctatgtggcctacaacatgtagtctcgtctcttggcttccatggacttttctagagatgtagacattgttctccgtgtccactgaagcgtgcagacacagggcaacactcaccagaatacagccatttgtggtgagagtggaggaggaagaggaggaggaagaggacttctcacagcagccacgattggcatgggggtgaaatgtgaatttaccactgaatttcgctcagaaggactttggattactgccttcagtttgttggaaaagcccatttcaaaaactttcttttcttttctttcttttttaattattggataataagtgctttcttcgtaaatgtggtattttgttaagccgaaatagcaattaaaaaaatatcctgccctccagatgggttcttttaaacaatttatgtagtgtgacaaagaattgttttctctgttttaatgtgtcatgaaatcttaatgacatggatctgttactaatttaagccattgctagatctcatccttttaggaaagtttgaggtacgagaaaaccttccaaatagcaccttccaattagataatagcagctttctttgtcagaaatgtgctgaagaaacaaaggctggtatacggccttcgaagttagtatagaatgagaagaaattataaataaggtgtatttcggcaattatcttgcaaatatctttgtactaaactaaaaagataaaataagttaacttcctcaatatgtaattatgtacaaaacgtttaatttattttgatctctttagaactataaaagagaaaaacattcaagaatattaaagtcttgtaatgtttgctaatataaaaaagtgttgtattatcttgcgtggatagtatcacaacaaatatatatatatgaaatataaattcactaatgaacaaaggagattttaaagtttaagatgcagaacttgtcacttgcatggtgtgccccccgtactcacatacactctgctgttgccagcagtcgcagaccgcaggagccctgtctaaaagtttcttctagaaccagagaccagcaagtgaaattattgccatctcaaggatggcaaaagaattcaaagctcaatgtgcactatttttttctttgctgtgggacaacagtgaatgtgtttatgccagcgtgtgctgatgatactgaggggctttaggttggcaaatagcactgttttcttagctgcaagaattcattgcacaatgtttttcatcatttttgttaatgtcatctttttttggtccttgctacgaaaaggaatgcgattctgtggtcattcgcactgggttgcattgattccccctctgatggccaatgtggagtggacaaagtgtccggaactcacatcggtgatcgtcccctcgtcttaagacccagcccgctctgtgtgagcctctggggctccctcgctcagtgagcacagttccccgggggttcatgccagagctccggctgaagcaagaagtcctccagctgcgtcgtttgccgcctgtggacgagtgcgccccagtttctgccctggcagctcctggccacaccttctcagagctcacctgtgcacttctaaattgaattggcccacggtgtccaaccaagaaggagcatctgcactccgagaaagatgtgttctgtaactgccccagtgtgaccccgcagtggctctcggtgctagatatgcatgactaagattgatgctgggcaaaatgtagatgatctttcattatgttgtgggcagcgtctttctctgcctttgctatatgcagtcagcagtaagccttttgctaaaagagttttgtttgacttctgagatccaaggctgattgttgttaaaaaaaaaaaaaaaaaaaagtggcacatttaaaaaaatgtgtctgcatatgtggtgcatccttccatctccacaaaccatttgattcttgaaatattgtttgacctcattgctgtgtgtgaatatttctccacatgcttcagatgcacattcctagtctctgcttcctaaggggggaaccaccacacattggggggaaaaaagacattttcctacacccacccaccttgttgaaagggaggtaggtttggggcttcaggccaggcactgactatgaaacattagctgcagtgtgcaggacagctttgaggtccagctgaagtcaggaagcaaaacaaatgtagatgtcacttcaaacataatttcaactgtcaccagatcaactctacattcaaggagtgtggacgctgcagtgcagttgtgagggcagttagcagccgcctcttctgcatcctgtcaactctgattagttagagtttaggctcaaaagagttggtggactgagattgaaatttggttgtgcaagagaaaggaaaggagacacttagtaccaccagtttcagcaataaagaagggtcattctgtattcaaaattgtactgtagataaatcattcatgagattgtaaaaaatgtttgtcttgtgaccttgtgcttttgaagtcagacaaaaccgtgtaatcaacttgcacaaaaagagggtacacagtgaacatataaacacagacctaatcaaacaggagcagattcctcatggtgcttgtttattatatatatttaatcctgcttgacactttacccaagggagatggtcccttttatcagttgaatgttagcagcgttatttcagagtgtggtgactggttagagaaactcatgtactcaaccagccacagtttcaaacaaaatttttatgtgcaaaggacagcaaccttcttgtatgttaaaccaccagtacgctttgtacatctgtgataacgcctgttttatattcaaatgaacaaataaaagcttttattttt

SEQ ID NO: 74 - DNA, 8417 bp, Homo sapien
ggggggggagggaggtccctgcgcgcccgccgcccgcctcccgcgcccgcgccgccgcctcctcctcggtgcggttccgccgggcgcgaggagccgccgagacctccgcctgcgaacaaagaggaggccgtgcggggcgcggcgcccgcggagcatggcggaccgcagcctgggagggcatggcgctgcccctggaggtgcgggcgcgcctggccgagctggagctggagctgtcggaaggtgacatcacacaaaaaggatatgaaaagaagaggtcaaagttaattggagcctaccttccgcagcctccgacagcgaatggagctgccgtggttcggtgtagactgcagcacagtgaaggagcgccgaggagaacattccgctctgcccacatcggggtgtgcgacgtccgagaagctgcggctcgggagcgggtggccagcaccgcagggaaccggcctctgttttactttcgtttcggggtggaccaagctttgccgcaagaacgccgggctcctgtcactccttcctccgcctctcgctaccaccgccgacggtcttcagggtcacgagatgagcgctatcggtcagacgtccacacggaagctgtccaggcggctctggccaaacacaaagagcggaagatggcagtgcctatgccttccaaacgcaggtccctggtcgtgcagacctcgatggacgcctacacccctccagatacctcttctggctcagaagatgaaggctcagtgcagggggactcccagggcacccccacctccagccagggcagcatcaatatggagcactggatcagccaggccatccacggctccaccacgtccaccacctcctcgtcctctacgcagagcgggggcagcggggctgcccacaggctggcggacgtcatggctcagacccacatagaaaatcattctgcacctcctgacgtaaccacgtacacctcagagcactcgatacaggtggagagaccgcagggttccacggggtcccggacagcgcccaagtacggcaacgccgagctcatggagaccggggatggagtaccagtaagtagccgggtgtcagcaaaaatccagcagcttgtcaataccctcaaacgaccgaaacgaccacctttacgagaattctttgtcgatgactttgaagaattattagaagttcaacaaccggatccgaaccaaccaaagccggagggggcccagatgctggccatgcgcggagagcagctgggcgtggtcacgaactggccgccgtcgctggaggccgcactgcagaggtggggcaccatctcgcccaaggcgccctgcctgaccaccatggacaccaacgggaagcccctctacatcctcacttacggcaagctgtggacaagaagtatgaaggtcgcttacagcattctacacaaattaggcacaaagcaggaacccatggtccggcctggagatagggtggcactggtgttccccaacaatgatccggctgccttcatggcggctttctacggctgcctgctggccgaggtggtccccgtgcccatcgaggtgccactcaccaggaaggacgcagggagccagcagataggtttcttgcttggaagctgtggagttactgtagccttgactagtgacgcctgccataaaggacttccaaaaagcccaacgggagagatcccacagtttaaaggttggccaaagctgctgtggtttgtcacagagtctaaacatctctccaaaccgccccgagactggttcccacacattaaagatgccaataacgacactgcgtatattgagtacaagacgtgtaaggatggcagtgtgctgggtgtgacggtgacgaggactgcgctgctgacacactgccaggccctgacgcaggcgtgtggctacacggaagctgaaaccattgtgaatgtgctggatttcaagaaggacgtcgggctctggcatggcatcctgacaagcgtcatgaacatgatgcatgtgatcagcatcccgtactcgctgatgaaggtgaaccctctctcctggatccagaaggtctgccagtacaaagcaaaagtggcgtgtgtgaaatcgagggatatgcattgggcattagtagcacacagagatcagagagacatcaacctctcctctctgcgaatgctgatagtggcggacggcgcgaacccctggtctatttcttcttgcgatgcatttctcaatgtcttccaaagtaaaggccttcgacaggaggtcatctgtccttgtgccagctcgccagaggccctcactgtggccatccggaggcccacggatgacagtaaccagcccccgggccggggtgtcctctccatgcatggactgacctatggggtcattcgtgtggactcggaagagaagctgtccgtgctcaccgtgcaggatgtcggcctcgtgatgcctggagccatcatgtgttcagtgaagccagacggggttcctcagctgtgcagaacggatgagatcggggagctgtgtgtgtgtgcagttgcgacgggcacgtcctactatggcctctctggcatgaccaagaacacctttgaggtgtttcccatgacaagctccggggctccgatcagtgaatacccattcataaggacaggcttgctggggttcgtgggtcccggaggcctcgtcttcgtggtgggcaagatggatggcctcatggtggtcagcgggcgcaggcacaacgccgacgacatcgtggccactgcgctggccgtagaacccatgaagtttgtctaccggggaaggatagccgtgttctcggtgaccgtgctgcacgacgagaggatcgtgatcgtggctgagcagaggcctgactccacggaagaggacagtttccagtggatgagccgtgtgctgcaggttgccctccctcgccctgggcactggtcccctgtgtcttgtttctggcctccttacttcattcagatcatggtgtgaccagctgttgctttgcccatggggtggccctttttcccttcccttcatttgatcaggaactacatcaagtgtccagaaactagctcagcagatcgagggtgtagggaccaggaatttgcacagctggttcctaccggacaccttggggaggtcgaagtaagctttttgtttgatcttgagaacatgttatcttttctccaaagttccttttttactgtgtatggtcttccacaagccctgggtaacattattcagctttggtgagtttagtaggaaaatcctttctcttaccttggcatttttatgctgggaacagtgcttatactgcacagacttctgtgtattgtggatcatattttgcataatataaatacgtactgtttatacttcctcttataacatgatttcctctttattaactttctaggcgattgacagtatacatcaagttggagtttattgcctggccttggtgccagcaaacaccctccccaaaaccccgcttggtgggatccatttatcagaaacaaaacagctttttctggagggctctctgcacccctgcaatgtcctaatgtgcccccacacctgcgtcacaaacttgcctaagcctcgacagaagcagccagaaatcggccctgcctctgtgatggtggggaacctggtctctgggaagagaatcgcccaggccagtggcagagacctgggtcagatcgaagataacgaccaggcacgcaagttcctgttcctctcagaggtcttgcagtggagagcacagaccaccccggaccacatcctctacacgctgctcaactgtcggggtgcgatagcgaactcgctgacctgcgtgcagctgcacaagagagctgagaagatcgccgtgatgctgatggagaggggccaccttcaggacggcgaccacgtggccttggtctaccccccaggaatagacctgatagcagcgttttatggttgcctgtacgcaggctgtgtgccaataaccgtccgtcccccgcacccacagaacatcgcgacgacgttgcctaccgtcaagatgattgtggaggtgagtcgctctgcctgtctgatgacgacacagctgatctgtaagttgctgcggtccagggaggcggcggcggctgtggacgtcaggacgtggcccctcatcctggacacagatgatttgccaaagaagcggcctgcccagatctgcaaaccttgcaacccagacactcttgcatatctcgacttcagcgtgtccacaactgggatgctagctggcgtaaagatgtctcacgcagccaccagtgccttctgccgttccattaagctgcagtgtgaactttacccctctagagaagtggccatctgcctggacccttactgtggactgggatttgtcctctggtgcctctgcagtgtgtattctgggcaccagtccatcctgatcccgccctctgagctggaaaccaaccccgccttgtggcttcttgccgtgagtcagtacaaagtccgagacacgttttgctcctactccgtgatggagctgtgcaccaaggggctgggctcgcaaacagagtccctcaaggcgcgagggctggacttgtcccgagtgaggacctgcgtggttgtggcggaagagaggcctcggatcgcactcacacagtcgttctcaaagctgtttaaggacctgggccttcacccgcgggccgtcagcacctcgttcggttgcagggtgaacctggcgatttgcttgcagggaacctcaggacctgacccaaccactgtctacgtggacatgagagccctgagacacgacagagtccgcttagtggaaagaggatcccctcatagtctgcccctgatggaatcgggaaagatacttccaggggttcggattataattgccaacccagaaacaaaaggaccgctgggggactcacaccttggagagatttgggttcacagtgcccacaatgccagcggttatttcactatttacggagacgaatccctccagtcagatcacttcaactcaagactaagttttggagacacccagaccatctgggcacgcacaggctacttggggttcctgcggagaactgagctcacagatgcaaatggagaaaagaaggaaacggcttgagcggcattatggggaagcttacgcaggctgtcattactccacagagcgccatgatgccctctacgtggtaggggcactggacgaagccatggagctgcggggcatgcggtaccacccaatcgacattgagacctcggtcatcagagcccataaaagcgttacggaatgtgctgtgtttacctggacaaatttgttggtggttgtggttgagctggatgggtcggaacaagaagccttggacctggttcccttggtgaccaacgtggtcctggaggagcactacctgatcgtcggagtggtggtcgtggtggacatcggcgtcatccccatcaactcccgtggggagaagcagcgcatgcacctgcgagacgggtttttggcagaccagctagaccccatctatgtggcctacaacatgtagtctcgtctcttggcttccatggacttttctagagatgtagacattgttctccgtgtccactgaagcgtgcagacacagggcaacactcaccagaatacagccatttgtggtgagagtggaggaggaagaggaggaggaagaggacttctcacagcagccacgattggcatgggggtgaaatgtgaatttaccactgaatttcgctcagaaggactttggattactgccttcagtttgttggaaaagcccatttcaaaaactttcttttcttttctttcttttttaattattggataataagtgctttcttcgtaaatgtggtattttgttaagccgaaatagcaattaaaaaaatatcctgccctccagatgggttcttttaaacaatttatgtagtgtgacaaagaattgttttctctgttttaatgtgtcatgaaatcttaatgacatggatctgttactaatttaagccattgctagatctcatccttttaggaaagtttgaggtacgagaaaaccttccaaatagcaccttccaattagataatagcagctttctttgtcagaaatgtgctgaagaaacaaaggctggtatacggccttcgaagttagtatagaatgagaagaaattataaataaggtgtatttcggcaattatcttgcaaatatctttgtactaaactaaaaagataaaataagttaacttcctcaatatgtaattatgtacaaaacgtttaatttattttgatctctttagaactataaaagagaaaaacattcaagaatattaaagtcttgtaatgtttgctaatataaaaaagtgttgtattatcttgcgtggatagtatcacaacaaatatatatatatgaaatataaattcactaatgaacaaaggagattttaaagtttaagatgcagaacttgtcacttgcatggtgtgccccccgtactcacatacactctgctgttgccagcagtcgcagaccgcaggagccctgtctaaaagtttcttctagaaccagagaccagcaagtgaaattattgccatctcaaggatggcaaaagaattcaaagctcaatgtgcactatttttttctttgctgtgggacaacagtgaatgtgtttatgccagcgtgtgctgatgatactgaggggctttaggttggcaaatagcactgttttcttagctgcaagaattcattgcacaatgtttttcatcatttttgttaatgtcatctttttttggtccttgctacgaaaaggaatgcgattctgtggtcattcgcactgggttgcattgattccccctctgatggccaatgtggagtggacaaagtgtccggaactcacatcggtgatcgtcccctcgtcttaagacccagcccgctctgtgtgagcctctggggctccctcgctcagtgagcacagttccccgggggttcatgccagagctccggctgaagcaagaagtcctccagctgcgtcgtttgccgcctgtggacgagtgcgccccagtttctgccctggcagctcctggccacaccttctcagagctcacctgtgcacttctaaattgaattggcccacggtgtccaaccaagaaggagcatctgcactccgagaaagatgtgttctgtaactgccccagtgtgaccccgcagtggctctcggtgctagatatgcatgactaagattgatgctgggcaaaatgtagatgatctttcattatgttgtgggcagcgtctttctctgcctttgctatatgcagtcagcagtaagccttttgctaaaagagttttgtttgacttctgagatccaaggctgattgttgttaaaaaaaaaaaaaaaaaaaagtggcacatttaaaaaaatgtgtctgcatatgtggtgcatccttccatctccacaaaccatttgattcttgaaatattgtttgacctcattgctgtgtgtgaatatttctccacatgcttcagatgcacattcctagtctctgcttcctaaggggggaaccaccacacattggggggaaaaaagacattttcctacacccacccaccttgttgaaagggaggtaggtttggggcttcaggccaggcactgactatgaaacattagctgcagtgtgcaggacagctttgaggtccagctgaagtcaggaagcaaaacaaatgtagatgtcacttcaaacataatttcaactgtcaccagatcaactctacattcaaggagtgtggacgctgcagtgcagttgtgagggcagttagcagccgcctcttctgcatcctgtcaactctgattagttagagtttaggctcaaaagagttggtggactgagattgaaatttggttgtgcaagagaaaggaaaggagacacttagtaccaccagtttcagcaataaagaagggtcattctgtattcaaaattgtactgtagataaatcattcatgagattgtaaaaaatgtttgtcttgtgaccttgtgcttttgaagtcagacaaaaccgtgtaatcaacttgcacaaaaagagggtacacagtgaacatataaacacagacctaatcaaacaggagcagattcctcatggtgcttgtttattatatatatttaatcctgcttgacactttacccaagggagatggtcccttttatcagttgaatgttagcagcgttatttcagagtgtggtgactggttagagaaactcatgtactcaaccagccacagtttcaaacaaaatttttatgtgcaaaggacagcaaccttcttgtatgttaaaccaccagtacgctttgtacatctgtgataacgcctgttttatattcaaatgaacaaataaaagcttttattttt

SEQ ID NO: 75 - DNA, 5816 bp, Homo sapien
ggggggggagggaggtccctgcgcgcccgccgcccgcctcccgcgcccgcgccgccgcctcctcctcggtgcggttccgccgggcgcgaggagccgccgagacctccgcctgcgaacaaagaggaggccgtgcggggcgcggcgcccgcggagcatggcggaccgcagcctgggagggcatggcgctgcccctggaggtgcgggcgcgcctggccgagctggagctggagctgtcggaaggtgacatcacacaaaaaggatatgaaaagaagaggtcaaagttaattggagcctaccttccgcagcctccgacagcgaatggagctgccgtggttcggtgtagactgcagcacagtgaaggagcgccgaggagaacattccgctctgcccacatcggggtgtgcgacgtccgagaagctgcggctcgggagcgggtggccagcaccgcagggaaccggcctctgttttactttcgtttcggggtggaccaagctttgccgcaagaacgccgggctcctgtcactccttcctccgcctctcgctaccaccgccgacggtcttcagggtcacgagatgagcgctatcggtcagacgtccacacggaagctgtccaggcggctctggccaaacacaaagagcggaagatggcagtgcctatgccttccaaacgcaggtccctggtcgtgcagacctcgatggacgcctacacccctccagatacctcttctggctcagaagatgaaggctcagtgcagggggactcccagggcacccccacctccagccagggcagcatcaatatggagcactggatcagccaggccatccacggctccaccacgtccaccacctcctcgtcctctacgcagagcgggggcagcggggctgcccacaggctggcggacgtcatggctcagacccacatagaaaatcattctgcacctcctgacgtaaccacgtacacctcagagcactcgatacaggtggagagaccgcagggttccacggggtcccggacagcgcccaagtacggcaacgccgagctcatggagaccggggatggagtaccagtaagtagccgggtgtcagcaaaaatccagcagcttgtcaataccctcaaacgaccgaaacgaccacctttacgagaattctttgtcgatgactttgaagaattattagaagttcaacaaccggatccgaaccaaccaaagccggagggggcccagatgctggccatgcgcggagagcagctgggcgtggtcacgaactggccgccgtcgctggaggccgcactgcagaggtggggcaccatctcgcccaaggcgccctgcctgaccaccatggacaccaacgggaagcccctctacatcctcacttacggcaagctgtggacaagaagtatgaaggtcgcttacagcattctacacaaattaggcacaaagcaggaacccatggtccggcctggagatagggtggcactggtgttccccaacaatgatccggctgccttcatggcggctttctacggctgcctgctggccgaggtggtccccgtgcccatcgaggtgccactcaccaggaaggacgcagggagccagcagataggtttcttgcttggaagctgtggagttactgtagccttgactagtgacgcctgccataaaggacttccaaaaagcccaacgggagagatcccacagtttaaaggttggccaaagctgctgtggtttgtcacagagtctaaacatctctccaaaccgccccgagactggttcccacacattaaagatgccaataacgacactgcgtatattgagtacaagacgtgtaaggatggcagtgtgctgggtgtgacggtgacgaggactgcgctgctgacacactgccaggccctgacgcaggcgtgtggctacacggaagctgaaaccattgtgaatgtgctggatttcaagaaggacgtcgggctctggcatggcatcctgacaagcgtcatgaacatgatgcatgtgatcagcatcccgtactcgctgatgaaggtgaaccctctctcctggatccagaaggtctgccagtacaaagcaaaagtggcgtgtgtgaaatcgagggatatgcattgggcattagtagcacacagagatcagagagacatcaacctctcctctctgcgaatgctgatagtggcggacggcgcgaacccctggtctatttcttcttgcgatgcatttctcaatgtcttccaaagtaaaggccttcgacaggaggtcatctgtccttgtgccagctcgccagaggccctcactgtggccatccggaggcccacggatgacagtaaccagcccccgggccggggtgtcctctccatgcatggactgacctatggggtcattcgtgtggactcggaagagaagctgtccgtgctcaccgtgcaggatgtcggcctcgtgatgcctggagccatcatgtgttcagtgaagccagacggggttcctcagctgtgcagaacggatgagatcggggagctgtgtgtgtgtgcagttgcgacgggcacgtcctactatggcctctctggcatgaccaagaacacctttgaggtgtttcccatgacaagctccggggctccgatcagtgaatacccattcataaggacaggcttgctggggttcgtgggtcccggaggcctcgtcttcgtggtgggcaagatggatggcctcatggtggtcagcgggcgcaggcacaacgccgacgacatcgtggccactgcgctggccgtagaacccatgaagtttgtctaccggggaaggatagccgtgttctcggtgaccgtgctgcacgacgagaggatcgtgatcgtggctgagcagaggcctgactccacggaagaggacagtttccagtggatgagccgtgtgctgcaggttgccctccctcgccctgggcactggtcccctgtgtcttgtttctggcctccttacttcattcagatcatggtgtgaccagctgttgctttgcccatggggtggccctttttcccttcccttcatttgatcaggaactacatcaagtgtccagaaactagctcagcagatcgagggtgtagggaccaggaatttgcacagctggttcctaccggacaccttggggaggtcgaagtaagctttttgtttgatcttgagaacatgttatcttttctccaaagttccttttttactgtgtatggtcttccacaagccctgggtaacattattcagctttggtgagtttagtaggaaaatcctttctcttaccttggcatttttatgctgggaacagtgcttatactgcacagacttctgtgtattgtggatcatattttgcataatataaatacgtactgtttatacttcctcttataacatgatttcctctttattaactttctaggcgattgacagtatacatcaagttggagtttattgcctggccttggtgccagcaaacaccctccccaaaaccccgcttggtgggatccatttatcagaaacaaaacagctttttctggagggctctctgcacccctgcaatgtcctaatgtgcccccacacctgcgtcacaaacttgcctaagcctcgacagaagcagccagaaatcggccctgcctctgtgatggtggggaacctggtctctgggaagagaatcgcccaggccagtggcagagacctgggtcagatcgaagataacgaccaggcacgcaagttcctgttcctctcagaggtcttgcagtggagagcacagaccaccccggaccacatcctctacacgctgctcaactgtcggggtgcgatagcgaactcgctgacctgcgtgcagctgcacaagagagctgagaagatcgccgtgatgctgatggagaggggccaccttcaggacggcgaccacgtggccttggtctaccccccaggaatagacctgatagcagcgttttatggttgcctgtacgcaggctgtgtgccaataaccgtccgtcccccgcacccacagaacatcgcgacgacgttgcctaccgtcaagatgattgtggaggtgagtcgctctgcctgtctgatgacgacacagctgatctgtaagttgctgcggtccagggaggcggcggcggctgtggacgtcaggacgtggcccctcatcctggacacagatgatttgccaaagaagcggcctgcccagatctgcaaaccttgcaacccagacactcttgcatatctcgacttcagcgtgtccacaactgggatgctagctggcgtaaagatgtctcacgcagccaccagtgccttctgccgttccattaagctgcagtgtgaactttacccctctagagaagtggccatctgcctggacccttactgtggactgggatttgtcctctggtgcctctgcagtgtgtattctgggcaccagtccatcctgatcccgccctctgagctggaaaccaaccccgccttgtggcttcttgccgtgagtcagtacaaagtccgagacacgttttgctcctactccgtgatggagctgtgcaccaaggggctgggctcgcaaacagagtccctcaaggcgcgagggctggacttgtcccgagtgaggacctgcgtggttgtggcggaagagaggcctcggatcgcactcacacagtcgttctcaaagctgtttaaggacctgggccttcacccgcgggccgtcagcacctcgttcggttgcagggtgaacctggcgatttgcttgcagcctcacaggctgtggaccctggccgagcagggaacctcaggacctgacccaaccactgtctacgtggacatgagagccctgagacacgacagagtccgcttagtggaaagaggatcccctcatagtctgcccctgatggaatcgggaaagatacttccaggggttcggattataattgccaacccagaaacaaaaggaccgctgggggactcacaccttggagagatttgggttcacagtgcccacaatgccagcggttatttcactatttacggagacgaatccctccagtcagatcacttcaactcaagactaagttttggagacacccagaccatctgggcacgcacaggctacttggggttcctgcggagaactgagctcacagatgcaaatggagagcgccatgatgccctctacgtggtaggggcactggacgaagccatggagctgcggggcatgcggtaccacccaatcgacattgagacctcggtcatcagagcccataaaagcgttacggaatgtgctgtgtttacctggacaaatttgttggtggttgtggttgagctggatgggtcggaacaagaagccttggacctggttcccttggtgaccaacgtggtcctggaggagcactacctgatcgtcggagtggtggtcgtggtggacatcggcgtcatccccatcaactcccgtggggagaagcagcgcatgcacctgcgagacgggtttttggcagaccagctagaccccatctatgtggcctacaacatgtagtctcgtctcttggcttccatggacttttctagagatgtagacattgttctccgtgtccactgaagcgtgcagacacagggcaacactcaccagaatacagccatttgtggtgagagtggaggaggaagaggaggaggaagaggacttctttcaaggagccccaggttggcatatggggttaaaatgtgggaattcccccagggattcgctccctcaagggcccctggggatctacgctccaaatttttttgggaaacgcctatctcaaaaatctttttttttttttt

SEQ ID NO: 76 - DNA, 5509 bp, Homo sapien
ggggggggagggaggtccctgcgcgcccgccgcccgcctcccgcgcccgcgccgccgcctcctcctcggtgcggttccgccgggcgcgaggagccgccgagacctccgcctgcgaacaaagaggaggccgtgcggggcgcggcgcccgcggagcatggcggaccgcagcctgggagggcatggcgctgcccctggaggtgcgggcgcgcctggccgagctggagctggagctgtcggaaggtgacatcacacaaaaaggatatgaaaagaagaggtcaaagttaattggagcctaccttccgcagcctccgacagcgaatggagctgccgtggttcggtgtagactgcagcacagtgaaggagcgccgaggagaacattccgctctgcccacatcggggtgtgcgacgtccgagaagctgcggctcgggagcgggtggccagcaccgcagggaaccggcctctgttttactttcgtttcggggtggaccaagctttgccgcaagaacgccgggctcctgtcactccttcctccgcctctcgctaccaccgccgacggtcttcagggtcacgagatgagcgctatcggtcagacgtccacacggaagctgtccaggcggctctggccaaacacaaagagcggaagatggcagtgcctatgccttccaaacgcaggtccctggtcgtgcagacctcgatggacgcctacacccctccagatacctcttctggctcagaagatgaaggctcagtgcagggggactcccagggcacccccacctccagccagggcagcatcaatatggagcactggatcagccaggccatccacggctccaccacgtccaccacctcctcgtcctctacgcagagcgggggcagcggggctgcccacaggctggcggacgtcatggctcagacccacatagaaaatcattctgcacctcctgacgtaaccacgtacacctcagagcactcgatacaggtggagagaccgcagggttccacggggtcccggacagcgcccaagtacggcaacgccgagctcatggagaccggggatggagtaccagtaagtagccgggtgtcagcaaaaatccagcagcttgtcaataccctcaaacgaccgaaacgaccacctttacgagaattctttgtcgatgactttgaagaattattagaagttcaacaaccggatccgaaccaaccaaagccggagggggcccagatgctggccatgcgcggagagcagctgggcgtggtcacgaactggccgccgtcgctggaggccgcactgcagaggtggggcaccatctcgcccaaggcgccctgcctgaccaccatggacaccaacgggaagcccctctacatcctcacttacggcaagctgtggacaagaagtatgaaggtcgcttacagcattctacacaaattaggcacaaagcaggaacccatggtccggcctggagatagggtggcactggtgttccccaacaatgatccggctgccttcatggcggctttctacggctgcctgctggccgaggtggtccccgtgcccatcgaggtgccactcaccaggaaggacgcagggagccagcagataggtttcttgcttggaagctgtggagttactgtagccttgactagtgacgcctgccataaaggacttccaaaaagcccaacgggagagatcccacagtttaaaggttggccaaagctgctgtggtttgtcacagagtctaaacatctctccaaaccgccccgagactggttcccacacattaaagatgccaataacgacactgcgtatattgagtacaagacgtgtaaggatggcagtgtgctgggtgtgacggtgacgaggactgcgctgctgacacactgccaggccctgacgcaggcgtgtggctacacggaagctgaaaccattgtgaatgtgctggatttcaagaaggacgtcgggctctggcatggcatcctgacaagcgtcatgaacatgatgcatgtgatcagcatcccgtactcgctgatgaaggtgaaccctctctcctggatccagaaggtctgccagtacaaagcaaaagtggcgtgtgtgaaatcgagggatatgcattgggcattagtagcacacagagatcagagagacatcaacctctcctctctgcgaatgctgatagtggcggacggcgcgaacccctggtctatttcttcttgcgatgcatttctcaatgtcttccaaagtaaaggccttcgacaggaggtcatctgtccttgtgccagctcgccagaggccctcactgtggccatccggaggcccacggatgacagtaaccagcccccgggccggggtgtcctctccatgcatggactgacctatggggtcattcgtgtggactcggaagagaagctgtccgtgctcaccgtgcaggatgtcggcctcgtgatgcctggagccatcatgtgttcagtgaagccagacggggttcctcagctgtgcagaacggatgagatcggggagctgtgtgtgtgtgcagttgcgacgggcacgtcctactatggcctctctggcatgaccaagaacacctttgaggtgtttcccatgacaagctccggggctccgatcagtgaatacccattcataaggacaggcttgctggggttcgtgggtcccggaggcctcgtcttcgtggtgggcaagatggatggcctcatggtggtcagcgggcgcaggcacaacgccgacgacatcgtggccactgcgctggccgtagaacccatgaagtttgtctaccggggaaggatagccgtgttctcggtgaccgtgctgcacgacgagaggatcgtgatcgtggctgagcagaggcctgactccacggaagaggacagtttccagtggatgagccgtgtgctgcaggttgccctccctcgccctgggcactggtcccctgtgtcttgtttctggcctccttacttcattcagatcatggtgtgaccagctgttgctttgcccatggggtggccctttttcccttcccttcatttgatcaggaactacatcaagtgtccagaaactagctcagcagatcgagggtgtagggaccaggaatttgcacagctggttcctaccggacaccttggggaggtcgaagtaagctttttgtttgatcttgagaacatgttatcttttctccaaagttccttttttactgtgtatggtcttccacaagccctgggtaacattattcagctttggtgagtttagtaggaaaatcctttctcttaccttggcatttttatgctgggaacagtgcttatactgcacagacttctgtgtattgtggatcatattttgcataatataaatacgtactgtttatacttcctcttataacatgatttcctctttattaactttctaggcgattgacagtatacatcaagttggagtttattgcctggccttggtgccagcaaacaccctccccaaaaccccgcttggtgggatccatttatcagaaacaaaacagctttttctggagggctctctgcacccctgcaatgtcctaatgtgcccccacacctgcgtcacaaacttgcctaagcctcgacagaagcagccagaaatcggccctgcctctgtgatggtggggaacctggtctctgggaagagaatcgcccaggccagtggcagagacctgggtcagatcgaagataacgaccaggcacgcaagttcctgttcctctcagaggtcttgcagtggagagcacagaccaccccggaccacatcctctacacgctgctcaactgtcggggtgcgatagcgaactcgctgacctgcgtgcagctgcacaagagagctgagaagatcgccgtgatgctgatggagaggggccaccttcaggacggcgaccacgtggccttggtctaccccccaggaatagacctgatagcagcgttttatggttgcctgtacgcaggctgtgtgccaataaccgtccgtcccccgcacccacagaacatcgcgacgacgttgcctaccgtcaagatgattgtggaggtgagtcgctctgcctgtctgatgacgacacagctgatctgtaagttgctgcggtccagggaggcggcggcggctgtggacgtcaggacgtggcccctcatcctggacacagatgatttgccaaagaagcggcctgcccagatctgcaaaccttgcaacccagacactcttgcatatctcgacttcagcgtgtccacaactgggatgctagctggcgtaaagatgtctcacgcagccaccagtgccttctgccgttccattaagctgcagtgtgaactttacccctctagagaagtggccatctgcctggacccttactgtggactgggatttgtcctctggtgcctctgcagtgtgtattctgggcaccagtccatcctgatcccgccctctgagctggaaaccaaccccgccttgtggcttcttgccgtgagtcagtacaaagtccgagacacgttttgctcctactccgtgatggagctgtgcaccaaggggctgggctcgcaaacagagtccctcaaggcgcgagggctggacttgtcccgagtgaggacctgcgtggttgtggcggaagagaggcctcggatcgcactcacacagtcgttctcaaagctgtttaaggacctgggccttcacccgcgggccgtcagcacctcgttcggttgcagggtgaacctggcgatttgcttgcagggaacctcaggacctgacccaaccactgtctacgtggacatgagagccctgagacacgacagagtccgcttagtggaaagaggatcccctcatagtctgcccctgatggaatcgggaaagatacttccaggggttcggattataattgccaacccagaaacaaaaggaccgctgggggactcacaccttggagagatttgggttcacagtgcccacaatgccagcggttatttcactatttacggagacgaatccctccagtcagatcacttcaactcaagactaagttttggagacacccagaccatctgggcacgcacaggctacttggggttcctgcggagaactgagctcacagatgcaaatggagagcgccatgatgccctctacgtggtaggggcactggacgaagccatggagctgcggggcatgcggtaccacccaatcgacattgagacctcggtcatcagagcccataaaagcgttacggaatgctagctgagatgcaataaaggctggtacttactgccatttgctgaatttgaacactaaggccttggcagaatttacaagatcaagtctgcatacctgtccgtgttcgtgtggctcaagttggctaagcccctactctcaaaagtcctcagattgtcgatttccttgacacttctctccttgagtatacagagaagacagaaactctaggaagactttggcccagaaactcggccagggcctaccttattttccgtctaaatag

SEQ ID NO: 77 - DNA, 4274 bp, Homo sapien
ggggggggagggaggtccctgcgcgcccgccgcccgcctcccgcgcccgcgccgccgcctcctcctcggtgcggttccgccgggcgcgaggagccgccgagacctccgcctgcgaacaaagaggaggccgtgcggggcgcggcgcccgcggagcatggcggaccgcagcctgggagggcatggcgctgcccctggaggtgcgggcgcgcctggccgagctggagctggagctgtcggaaggtgacatcacacaaaaaggatatgaaaagaagaggtcaaagttaattggagcctaccttccgcagcctccgacagcgaatggagctgccgtggttcggtgtagactgcagcacagtgaaggagcgccgaggagaacattccgctctgcccacatcggggtgtgcgacgtccgagaagctgcggctcgggagcgggtggccagcaccgcagggaaccggcctctgttttactttcgtttcggggtggaccaagctttgccgcaagaacgccgggctcctgtcactccttcctccgcctctcgctaccaccgccgacggtcttcagggtcacgagatgagcgctatcggtcagacgtccacacggaagctgtccaggcggctctggccaaacacaaagagcggaagatggcagtgcctatgccttccaaacgcaggtccctggtcgtgcagacctcgatggacgcctacacccctccagatacctcttctggctcagaagatgaaggctcagtgcagggggactcccagggcacccccacctccagccagggcagcatcaatatggagcactggatcagccaggccatccacggctccaccacgtccaccacctcctcgtcctctacgcagagcgggggcagcggggctgcccacaggctggcggacgtcatggctcagacccacatagaaaatcattctgcacctcctgacgtaaccacgtacacctcagagcactcgatacaggtggagagaccgcagggttccacggggtcccggacagcgcccaagtacggcaacgccgagctcatggagaccggggatggagtaccagtaagtagccgggtgtcagcaaaaatccagcagcttgtcaataccctcaaacgaccgaaacgaccacctttacgagaattctttgtcgatgactttgaagaattattagaagttcaacaaccggatccgaaccaaccaaagccggagggggcccagatgctggccatgcgcggagagcagctgggcgtggtcacgaactggccgccgtcgctggaggccgcactgcagaggtggggcaccatctcgcccaaggcgccctgcctgaccaccatggacaccaacgggaagcccctctacatcctcacttacggcaagctgtggacaagaagtatgaaggtcgcttacagcattctacacaaattaggcacaaagcaggaacccatggtccggcctggagatagggtggcactggtgttccccaacaatgatccggctgccttcatggcggctttctacggctgcctgctggccgaggtggtccccgtgcccatcgaggtgccactcaccaggaaggacgcagggagccagcagataggtttcttgcttggaagctgtggagttactgtagccttgactagtgacgcctgccataaaggacttccaaaaagcccaacgggagagatcccacagtttaaaggttggccaaagctgctgtggtttgtcacagagtctaaacatctctccaaaccgccccgagactggttcccacacattaaagatgccaataacgacactgcgtatattgagtacaagacgtgtaaggatggcagtgtgctgggtgtgacggtgacgaggactgcgctgctgacacactgccaggccctgacgcaggcgtgtggctacacggaagctgaaaccattgtgaatgtgctggatttcaagaaggacgtcgggctctggcatggcatcctgacaagcgtcatgaacatgatgcatgtgatcagcatcccgtactcgctgatgaaggtgaaccctctctcctggatccagaaggtctgccagtacaaagcaaaagtggcgtgtgtgaaatcgagggatatgcattgggcattagtagcacacagagatcagagagacatcaacctctcctctctgcgaatgctgatagtggcggacggcgcgaacccctggtctatttcttcttgcgatgcatttctcaatgtcttccaaagtaaaggccttcgacaggaggtcatctgtccttgtgccagctcgccagaggccctcactgtggccatccggaggcccacggatgacagtaaccagcccccgggccggggtgtcctctccatgcatggactgacctatggggtcattcgtgtggactcggaagagaagctgtccgtgctcaccgtgcaggatgtcggcctcgtgatgcctggagccatcatgtgttcagtgaagccagacggggttcctcagctgtgcagaacggatgagatcggggagctgtgtgtgtgtgcagttgcgacgggcacgtcctactatggcctctctggcatgaccaagaacacctttgaggtgtttcccatgacaagctccggggctccgatcagtgaatacccattcataaggacaggcttgctggggttcgtgggtcccggaggcctcgtcttcgtggtgggcaagatggatggcctcatggtggtcagcgggcgcaggcacaacgccgacgacatcgtggccactgcgctggccgtagaacccatgaagtttgtctaccggggaaggatagccgtgttctcggtgaccgtgctgcacgacgagaggatcgtgatcgtggctgagcagaggcctgactccacggaagaggacagtttccagtggatgagccgtgtgctgcaggttgccctccctcgccctgggcactggtcccctgtgtcttgtttctggcctccttacttcattcagatcatggtgtgaccagctgttgctttgcccatggggtggccctttttcccttcccttcatttgatcaggaactacatcaagtgtccagaaactagctcagcagatcgagggtgtagggaccaggaatttgcacagctggttcctaccggacaccttggggaggtcgaagtaagctttttgtttgatcttgagaacatgttatcttttctccaaagttccttttttactgtgtatggtcttccacaagccctgggtaacattattcagctttggtgagtttagtaggaaaatcctttctcttaccttggcatttttatgctgggaacagtgcttatactgcacagacttctgtgtattgtggatcatattttgcataatataaatacgtactgtttatacttcctcttataacatgatttcctctttattaactttctaggcgattgacagtatacatcaagttggagtttattgcctggccttggtgccagcaaacaccctccccaaaaccccgcttggtgggatccatttatcagaaacaaaacagctttttctggagggctctctgcacccctgcaatgtcctaatgtgcccccacacctgcgtcacaaacttgcctaagcctcgacagaagcagccagaaatcggccctgcctctgtgatggtggggaacctggtctctgggaagagaatcgcccaggccagtggcagagacctgggtcagatcgaagataacgaccaggcacgcaagttcctgttcctctcagaggtcttgcagtggagagcacagaccaccccggaccacatcctctacacgctgctcaactgtcgggtgaggcgcggagctggccttccctggctactggcctcaaggggcctagcctggttcctgggagcgctcctgcttctttctttgaatccttttgcttcagtcttatgggaattctttttatgttttgctattttgactgagacttttgtacctagggattgtttttaaacgtaaccatttgtgcagttatttacacctatttgtgtgtacagatattttagcaacctatttacaatatttctcccccaaaatgagtaatgatatctgcaagagagaaatcgtaagtctatgagatatttgcatttttattttgattactaaactagtttttgttttgttttgtgttttgaggcagtctcgctctgttgcccaggctagagttcagtggcacgatctccgctcactgcaacctccacctccctggttgaagcaattctcgtgcatcagcctccgggtagctg

SEQ ID NO: 78 - DNA, 214 bp, Homo sapien
ctagagtatcccctcggaacgtgttatcctccagtaaatcagaaacaaaacagctttttctggagggctctctgcacccctgcaatgtcctaatgtgcccccacacctgcgtcacaaacttgcctaagcctcgacagaagcagccaggtatgtgcaccacttgggcagcttgtgaggtgcgggagttcccttggggctgcacggcactgggagg

SEQ ID NO: 79 - DNA, 8117 bp, Homo sapien
ggggggggagggaggtccctgcgcgcccgccgcccgcctcccgcgcccgcgccgccgcctcctcctcggtgcggttccgccgggcgcgaggagccgccgagacctccgcctgcgaacaaagaggaggccgtgcggggcgcggcgcccgcggagcatggcggaccgcagcctgggagggcatggcgctgcccctggaggtgcgggcgcgcctggccgagctggagctggagctgtcggaaggtgacatcacacaaaaaggatatgaaaagaagaggtcaaagttaattggagcctaccttccgcagcctccgacagcgaatggagctgccgtggttcggtgtagactgcagcacagtgaaggagcgccgaggagaacattccgctctgcccacatcggggtgtgcgacgtccgagaagctgcggctcgggagcgggtggccagcaccgcagggaaccggcctctgttttactttcgtttcggggtggaccaagctttgccgcaagaacgccgggctcctgtcactccttcctccgcctctcgctaccaccgccgacggtcttcagggtcacgagatgagcgctatcggtcagacgtccacacggaagctgtccaggcggctctggccaaacacaaagagcggaagatggcagtgcctatgccttccaaacgcaggtccctggtcgtgcagacctcgatggacgcctacacccctccagatacctcttctggctcagaagatgaaggctcagtgcagggggactcccagggcacccccacctccagccagggcagcatcaatatggagcactggatcagccaggccatccacggctccaccacgtccaccacctcctcgtcctctacgcagagcgggggcagcggggctgcccacaggctggcggacgtcatggctcagacccacatagaaaatcattctgcacctcctgacgtaaccacgtacacctcagagcactcgatacaggtggagagaccgcagggttccacggggtcccggacagcgcccaagtacggcaacgccgagctcatggagaccggggatggagtaccagtaagtagccgggtgtcagcaaaaatccagcagcttgtcaataccctcaaacgaccgaaacgaccacctttacgagaattctttgtcgatgactttgaagaattattagaagttcaacaaccggatccgaaccaaccaaagccggagggggcccagatgctggccatgcgcggagagcagctgggcgtggtcacgaactggccgccgtcgctggaggccgcactgcagaggtggggcaccatctcgcccaaggcgccctgcctgaccaccatggacaccaacgggaagcccctctacatcctcacttacggcaagctgtggacaagaagtatgaaggtcgcttacagcattctacacaaattaggcacaaagcaggaacccatggtccggcctggagatagggtggcactggtgttccccaacaatgatccggctgccttcatggcggctttctacggctgcctgctggccgaggtggtccccgtgcccatcgaggtgccactcaccaggaaggacgcagggagccagcagataggtttcttgcttggaagctgtggagttactgtagccttgactagtgacgcctgccataaaggacttccaaaaagcccaacgggagagatcccacagtttaaaggttggccaaagctgctgtggtttgtcacagagtctaaacatctctccaaaccgccccgagactggttcccacacattaaagatgccaataacgacactgcgtatattgagtacaagacgtgtaaggatggcagtgtgctgggtgtgacggtgacgaggactgcgctgctgacacactgccaggccctgacgcaggcgtgtggctacacggaagctgaaaccattgtgaatgtgctggatttcaagaaggacgtcgggctctggcatggcatcctgacaagcgtcatgaacatgatgcatgtgatcagcatcccgtactcgctgatgaaggtgaaccctctctcctggatccagaaggtctgccagtacaaagcaaaagtggcgtgtgtgaaatcgagggatatgcattgggcattagtagcacacagagatcagagagacatcaacctctcctctctgcgaatgctgatagtggcggacggcgcgaacccctggtctatttcttcttgcgatgcatttctcaatgtcttccaaagtaaaggccttcgacaggaggtcatctgtccttgtgccagctcgccagaggccctcactgtggccatccggaggcccacggatgacagtaaccagcccccgggccggggtgtcctctccatgcatggactgacctatggggtcattcgtgtggactcggaagagaagctgtccgtgctcaccgtgcaggatgtcggcctcgtgatgcctggagccatcatgtgttcagtgaagccagacggggttcctcagctgtgcagaacggatgagatcggggagctgtgtgtgtgtgcagttgcgacgggcacgtcctactatggcctctctggcatgaccaagaacacctttgaggtgtttcccatgacaagctccggggctccgatcagtgaatacccattcataaggacaggcttgctggggttcgtgggtcccggaggcctcgtcttcgtggtgggcaagatggatggcctcatggtggtcagcgggcgcaggcacaacgccgacgacatcgtggccactgcgctggccgtagaacccatgaagtttgtctaccggggaaggatagccgtgttctcggtgaccgtgctgcacgacgagaggatcgtgatcgtggctgagcagaggcctgactccacggaagaggacagtttccagtggatgagccgtgtgctgcaggcgattgacagtatacatcaagttggagtttattgcctggccttggtgccagcaaacaccctccccaaaaccccgcttggtgggatccatttatcagaaacaaaacagctttttctggagggctctctgcacccctgcaatgtcctaatgtgcccccacacctgcgtcacaaacttgcctaagcctcgacagaagcagccagaaatcggccctgcctctgtgatggtggggaacctggtctctgggaagagaatcgcccaggccagtggcagagacctgggtcagatcgaagataacgaccaggcacgcaagttcctgttcctctcagaggtcttgcagtggagagcacagaccaccccggaccacatcctctacacgctgctcaactgtcggggtgcgatagcgaactcgctgacctgcgtgcagctgcacaagagagctgagaagatcgccgtgatgctgatggagaggggccaccttcaggacggcgaccacgtggccttggtctaccccccaggaatagacctgatagcagcgttttatggttgcctgtacgcaggctgtgtgccaataaccgtccgtcccccgcacccacagaacatcgcgacgacgttgcctaccgtcaagatgattgtggaggtgagtcgctctgcctgtctgatgacgacacagctgatctgtaagttgctgcggtccagggaggcggcggcggctgtggacgtcaggacgtggcccctcatcctggacacagatgatttgccaaagaagcggcctgcccagatctgcaaaccttgcaacccagacactcttgcatatctcgacttcagcgtgtccacaactgggatgctagctggcgtaaagatgtctcacgcagccaccagtgccttctgccgttccattaagctgcagtgtgaactttacccctctagagaagtggccatctgcctggacccttactgtggactgggatttgtcctctggtgcctctgcagtgtgtattctgggcaccagtccatcctgatcccgccctctgagctggaaaccaaccccgccttgtggcttcttgccgtgagtcagtacaaagtccgagacacgttttgctcctactccgtgatggagctgtgcaccaaggggctgggctcgcaaacagagtccctcaaggcgcgagggctggacttgtcccgagtgaggacctgcgtggttgtggcggaagagaggcctcggatcgcactcacacagtcgttctcaaagctgtttaaggacctgggccttcacccgcgggccgtcagcacctcgttcggttgcagggtgaacctggcgatttgcttgcagggaacctcaggacctgacccaaccactgtctacgtggacatgagagccctgagacacgacagagtccgcttagtggaaagaggatcccctcatagtctgcccctgatggaatcgggaaagatacttccaggggttcggattataattgccaacccagaaacaaaaggaccgctgggggactcacaccttggagagatttgggttcacagtgcccacaatgccagcggttatttcactatttacggagacgaatccctccagtcagatcacttcaactcaagactaagttttggagacacccagaccatctgggcacgcacaggctacttggggttcctgcggagaactgagctcacagatgcaaatggagagcgccatgatgccctctacgtggtaggggcactggacgaagccatggagctgcggggcatgcggtaccacccaatcgacattgagacctcggtcatcagagcccataaaagcgttacggaatgtgctgtgtttacctggacaaatttgttggtggttgtggttgagctggatgggtcggaacaagaagccttggacctggttcccttggtgaccaacgtggtcctggaggagcactacctgatcgtcggagtggtggtcgtggtggacatcggcgtcatccccatcaactcccgtggggagaagcagcgcatgcacctgcgagacgggtttttggcagaccagctagaccccatctatgtggcctacaacatgtagtctcgtctcttggcttccatggacttttctagagatgtagacattgttctccgtgtccactgaagcgtgcagacacagggcaacactcaccagaatacagccatttgtggtgagagtggaggaggaagaggaggaggaagaggacttctcacagcagccacgattggcatgggggtgaaatgtgaatttaccactgaatttcgctcagaaggactttggattactgccttcagtttgttggaaaagcccatttcaaaaactttcttttcttttctttcttttttaattattggataataagtgctttcttcgtaaatgtggtattttgttaagccgaaatagcaattaaaaaaatatcctgccctccagatgggttcttttaaacaatttatgtagtgtgacaaagaattgttttctctgttttaatgtgtcatgaaatcttaatgacatggatctgttactaatttaagccattgctagatctcatccttttaggaaagtttgaggtacgagaaaaccttccaaatagcaccttccaattagataatagcagctttctttgtcagaaatgtgctgaagaaacaaaggctggtatacggccttcgaagttagtatagaatgagaagaaattataaataaggtgtatttcggcaattatcttgcaaatatctttgtactaaactaaaaagataaaataagttaacttcctcaatatgtaattatgtacaaaacgtttaatttattttgatctctttagaactataaaagagaaaaacattcaagaatattaaagtcttgtaatgtttgctaatataaaaaagtgttgtattatcttgcgtggatagtatcacaacaaatatatatatatgaaatataaattcactaatgaacaaaggagattttaaagtttaagatgcagaacttgtcacttgcatggtgtgccccccgtactcacatacactctgctgttgccagcagtcgcagaccgcaggagccctgtctaaaagtttcttctagaaccagagaccagcaagtgaaattattgccatctcaaggatggcaaaagaattcaaagctcaatgtgcactatttttttctttgctgtgggacaacagtgaatgtgtttatgccagcgtgtgctgatgatactgaggggctttaggttggcaaatagcactgttttcttagctgcaagaattcattgcacaatgtttttcatcatttttgttaatgtcatctttttttggtccttgctacgaaaaggaatgcgattctgtggtcattcgcactgggttgcattgattccccctctgatggccaatgtggagtggacaaagtgtccggaactcacatcggtgatcgtcccctcgtcttaagacccagcccgctctgtgtgagcctctggggctccctcgctcagtgagcacagttccccgggggttcatgccagagctccggctgaagcaagaagtcctccagctgcgtcgtttgccgcctgtggacgagtgcgccccagtttctgccctggcagctcctggccacaccttctcagagctcacctgtgcacttctaaattgaattggcccacggtgtccaaccaagaaggagcatctgcactccgagaaagatgtgttctgtaactgccccagtgtgaccccgcagtggctctcggtgctagatatgcatgactaagattgatgctgggcaaaatgtagatgatctttcattatgttgtgggcagcgtctttctctgcctttgctatatgcagtcagcagtaagccttttgctaaaagagttttgtttgacttctgagatccaaggctgattgttgttaaaaaaaaaaaaaaaaaaaagtggcacatttaaaaaaatgtgtctgcatatgtggtgcatccttccatctccacaaaccatttgattcttgaaatattgtttgacctcattgctgtgtgtgaatatttctccacatgcttcagatgcacattcctagtctctgcttcctaaggggggaaccaccacacattggggggaaaaaagacattttcctacacccacccaccttgttgaaagggaggtaggtttggggcttcaggccaggcactgactatgaaacattagctgcagtgtgcaggacagctttgaggtccagctgaagtcaggaagcaaaacaaatgtagatgtcacttcaaacataatttcaactgtcaccagatcaactctacattcaaggagtgtggacgctgcagtgcagttgtgagggcagttagcagccgcctcttctgcatcctgtcaactctgattagttagagtttaggctcaaaagagttggtggactgagattgaaatttggttgtgcaagagaaaggaaaggagacacttagtaccaccagtttcagcaataaagaagggtcattctgtattcaaaattgtactgtagataaatcattcatgagattgtaaaaaatgtttgtcttgtgaccttgtgcttttgaagtcagacaaaaccgtgtaatcaacttgcacaaaaagagggtacacagtgaacatataaacacagacctaatcaaacaggagcagattcctcatggtgcttgtttattatatatatttaatcctgcttgacactttacccaagggagatggtcccttttatcagttgaatgttagcagcgttatttcagagtgtggtgactggttagagaaactcatgtactcaaccagccacagtttcaaacaaaatttttatgtgcaaaggacagcaaccttcttgtatgttaaaccaccagtacgctttgtacatctgtgataacgcctgttttatattcaaatgaacaaataaaagcttttatttttgttgctctgaaaatagcagtttcttaattggtcccctggaaagatgtctgggacagctttaatcccgggaaggaagtgactcctacagggaaatgtatctgactctgtttacataatttgttgcattacttagtacagataatcatactttgaaaaatgtttaaattttgatgtgggcatttattgctaaaaataattcctatggcaacaaatgttttgtgaaatgttttttttaattcttttaaatatatctaaatatatttgttcac

SEQ ID NO: 80 - DNA, 8353 bp, Homo sapien
ggggggggagggaggtccctgcgcgcccgccgcccgcctcccgcgcccgcgccgccgcctcctcctcggtgcggttccgccgggcgcgaggagccgccgagacctccgcctgcgaacaaagaggaggccgtgcggggcgcggcgcccgcggagcatggcggaccgcagcctgggagggcatggcgctgcccctggaggtgcgggcgcgcctggccgagctggagctggagctgtcggaaggtgacatcacacaaaaaggatatgaaaagaagaggtcaaagttaattggagcctaccttccgcagcctccgacagcgaatggagctgccgtggttcggtgtagactgcagcacagtgaaggagcgccgaggagaacattccgctctgcccacatcggggtgtgcgacgtccgagaagctgcggctcgggagcgggtggccagcaccgcagggaaccggcctctgttttactttcgtttcggggtggaccaagctttgccgcaagaacgccgggctcctgtcactccttcctccgcctctcgctaccaccgccgacggtcttcagggtcacgagatgagcgctatcggtcagacgtccacacggaagctgtccaggcggctctggccaaacacaaagagcggaagatggcagtgcctatgccttccaaacgcaggtccctggtcgtgcagacctcgatggacgcctacacccctccagatacctcttctggctcagaagatgaaggctcagtgcagggggactcccagggcacccccacctccagccagggcagcatcaatatggagcactggatcagccaggccatccacggctccaccacgtccaccacctcctcgtcctctacgcagagcgggggcagcggggctgcccacaggctggcggacgtcatggctcagacccacatagaaaatcattctgcacctcctgacgtaaccacgtacacctcagagcactcgatacaggtggagagaccgcagggttccacggggtcccggacagcgcccaagtacggcaacgccgagctcatggagaccggggatggagtaccagtaagtagccgggtgtcagcaaaaatccagcagcttgtcaataccctcaaacgaccgaaacgaccacctttacgagaattctttgtcgatgactttgaagaattattagaagttcaacaaccggatccgaaccaaccaaagccggagggggcccagatgctggccatgcgcggagagcagctgggcgtggtcacgaactggccgccgtcgctggaggccgcactgcagaggtggggcaccatctcgcccaaggcgccctgcctgaccaccatggacaccaacgggaagcccctctacatcctcacttacggcaagctgtggacaagaagtatgaaggtcgcttacagcattctacacaaattaggcacaaagcaggaacccatggtccggcctggagatagggtggcactggtgttccccaacaatgatccggctgccttcatggcggctttctacggctgcctgctggccgaggtggtccccgtgcccatcgaggtgccactcaccaggaaggacgcagggagccagcagataggtttcttgcttggaagctgtggagttactgtagccttgactagtgacgcctgccataaaggacttccaaaaagcccaacgggagagatcccacagtttaaaggttggccaaagctgctgtggtttgtcacagagtctaaacatctctccaaaccgccccgagactggttcccacacattaaagatgccaataacgacactgcgtatattgagtacaagacgtgtaaggatggcagtgtgctgggtgtgacggtgacgaggactgcgctgctgacacactgccaggccctgacgcaggcgtgtggctacacggaagctgaaaccattgtgaatgtgctggatttcaagaaggacgtcgggctctggcatggcatcctgacaagcgtcatgaacatgatgcatgtgatcagcatcccgtactcgctgatgaaggtgaaccctctctcctggatccagaaggtctgccagtacaaagcaaaagtggcgtgtgtgaaatcgagggatatgcattgggcattagtagcacacagagatcagagagacatcaacctctcctctctgcgaatgctgatagtggcggacggcgcgaacccctggtctatttcttcttgcgatgcatttctcaatgtcttccaaagtaaaggccttcgacaggaggtcatctgtccttgtgccagctcgccagaggccctcactgtggccatccggaggcccacggatgacagtaaccagcccccgggccggggtgtcctctccatgcatggactgacctatggggtcattcgtgtggactcggaagagaagctgtccgtgctcaccgtgcaggatgtcggcctcgtgatgcctggagccatcatgtgttcagtgaagccagacggggttcctcagctgtgcagaacggatgagatcggggagctgtgtgtgtgtgcagttgcgacgggcacgtcctactatggcctctctggcatgaccaagaacacctttgaggtgtttcccatgacaagctccggggctccgatcagtgaatacccattcataaggacaggcttgctggggttcgtgggtcccggaggcctcgtcttcgtggtgggcaagatggatggcctcatggtggtcagcgggcgcaggcacaacgccgacgacatcgtggccactgcgctggccgtagaacccatgaagtttgtctaccggggaaggatagccgtgttctcggtgaccgtgctgcacgacgagaggatcgtgatcgtggctgagcagaggcctgactccacggaagaggacagtttccagtggatgagccgtgtgctgcaggttgccctccctcgccctgggcactggtcccctgtgtcttgtttctggcctccttacttcattcagatcatggtgtgaccagctgttgctttgcccatggggtggccctttttcccttcccttcatttgatcaggaactacatcaagtgtccagaaactagctcagcagatcgagggtgtagggaccaggaatttgcacagctggttcctaccggacaccttggggaggtcgaagtaagctttttgtttgatcttgagaacatgttatcttttctccaaagttccttttttactgtgtatggtcttccacaagccctgggtaacattattcagctttggtgagtttagtaggaaaatcctttctcttaccttggcatttttatgctgggaacagtgcttatactgcacagacttctgtgtattgtggatcatattttgcataatataaatacgtactgtttatacttcctcttataacatgatttcctctttattaactttctaggcgattgacagtatacatcaagttggagtttattgcctggccttggtgccagcaaacaccctccccaaaaccccgcttggtgggatccatttatcagaaacaaaacagctttttctggagggctctctgcacccctgcaatgtcctaatgtgcccccacacctgcgtcacaaacttgcctaagcctcgacagaagcagccagaaatcggccctgcctctgtgatggtggggaacctggtctctgggaagagaatcgcccaggccagtggcagagacctgggtcagatcgaagataacgaccaggcacgcaagttcctgttcctctcagaggtcttgcagtggagagcacagaccaccccggaccacatcctctacacgctgctcaactgtcggggtgcgatagcgaactcgctgacctgcgtgcagctgcacaagagagctgagaagatcgccgtgatgctgatggagaggggccaccttcaggacggcgaccacgtggccttggtctaccccccaggaatagacctgatagcagcgttttatggttgcctgtacgcaggctgtgtgccaataaccgtccgtcccccgcacccacagaacatcgcgacgacgttgcctaccgtcaagatgattgtggaggtgagtcgctctgcctgtctgatgacgacacagctgatctgtaagttgctgcggtccagggaggcggcggcggctgtggacgtcaggacgtggcccctcatcctggacacagatgatttgccaaagaagcggcctgcccagatctgcaaaccttgcaacccagacactcttgcatatctcgacttcagcgtgtccacaactgggatgctagctggcgtaaagatgtctcacgcagccaccagtgccttctgccgttccattaagctgcagtgtgaactttacccctctagagaagtggccatctgcctggacccttactgtggactgggatttgtcctctggtgcctctgcagtgtgtattctgggcaccagtccatcctgatcccgccctctgagctggaaaccaaccccgccttgtggcttcttgccgtgagtcagtacaaagtccgagacacgttttgctcctactccgtgatggagctgtgcaccaaggggctgggctcgcaaacagagtccctcaaggcgcgagggctggacttgtcccgagtgaggacctgcgtggttgtggcggaagagaggcctcggatcgcactcacacagtcgttctcaaagctgtttaaggacctgggccttcacccgcgggccgtcagcacctcgttcggttgcagggtgaacctggcgatttgcttgcagggaacctcaggacctgacccaaccactgtctacgtggacatgagagccctgagacacgacagagtccgcttagtggaaagaggatcccctcatagtctgcccctgatggaatcgggaaagatacttccaggggttcggattataattgccaacccagaaacaaaaggaccgctgggggactcacaccttggagagatttgggttcacagtgcccacaatgccagcggttatttcactatttacggagacgaatccctccagtcagatcacttcaactcaagactaagttttggagacacccagaccatctgggcacgcacaggctacttggggttcctgcggagaactgagctcacagatgcaaatggagagcgccatgatgccctctacgtggtaggggcactggacgaagccatggagctgcggggcatgcggtaccacccaatcgacattgagacctcggtcatcagagcccataaaagcgttacggaatgtgctgtgtttacctggacaaatttgttggtggttgtggttgagctggatgggtcggaacaagaagccttggacctggttcccttggtgaccaacgtggtcctggaggagcactacctgatcgtcggagtggtggtcgtggtggacatcggcgtcatccccatcaactcccgtggggagaagcagcgcatgcacctgcgagacgggtttttggcagaccagctagaccccatctatgtggcctacaacatgtagtctcgtctcttggcttccatggacttttctagagatgtagacattgttctccgtgtccactgaagcgtgcagacacagggcaacactcaccagaatacagccatttgtggtgagagtggaggaggaagaggaggaggaagaggacttctcacagcagccacgattggcatgggggtgaaatgtgaatttaccactgaatttcgctcagaaggactttggattactgccttcagtttgttggaaaagcccatttcaaaaactttcttttcttttctttcttttttaattattggataataagtgctttcttcgtaaatgtggtattttgttaagccgaaatagcaattaaaaaaatatcctgccctccagatgggttcttttaaacaatttatgtagtgtgacaaagaattgttttctctgttttaatgtgtcatgaaatcttaatgacatggatctgttactaatttaagccattgctagatctcatccttttaggaaagtttgaggtacgagaaaaccttccaaatagcaccttccaattagataatagcagctttctttgtcagaaatgtgctgaagaaacaaaggctggtatacggccttcgaagttagtatagaatgagaagaaattataaataaggtgtatttcggcaattatcttgcaaatatctttgtactaaactaaaaagataaaataagttaacttcctcaatatgtaattatgtacaaaacgtttaatttattttgatctctttagaactataaaagagaaaaacattcaagaatattaaagtcttgtaatgtttgctaatataaaaaagtgttgtattatcttgcgtggatagtatcacaacaaatatatatatatgaaatataaattcactaatgaacaaaggagattttaaagtttaagatgcagaacttgtcacttgcatggtgtgccccccgtactcacatacactctgctgttgccagcagtcgcagaccgcaggagccctgtctaaaagtttcttctagaaccagagaccagcaagtgaaattattgccatctcaaggatggcaaaagaattcaaagctcaatgtgcactatttttttctttgctgtgggacaacagtgaatgtgtttatgccagcgtgtgctgatgatactgaggggctttaggttggcaaatagcactgttttcttagctgcaagaattcattgcacaatgtttttcatcatttttgttaatgtcatctttttttggtccttgctacgaaaaggaatgcgattctgtggtcattcgcactgggttgcattgattccccctctgatggccaatgtggagtggacaaagtgtccggaactcacatcggtgatcgtcccctcgtcttaagacccagcccgctctgtgtgagcctctggggctccctcgctcagtgagcacagttccccgggggttcatgccagagctccggctgaagcaagaagtcctccagctgcgtcgtttgccgcctgtggacgagtgcgccccagtttctgccctggcagctcctggccacaccttctcagagctcacctgtgcacttctaaattgaattggcccacggtgtccaaccaagaaggagcatctgcactccgagaaagatgtgttctgtaactgccccagtgtgaccccgcagtggctctcggtgctagatatgcatgactaagattgatgctgggcaaaatgtagatgatctttcattatgttgtgggcagcgtctttctctgcctttgctatatgcagtcagcagtaagccttttgctaaaagagttttgtttgacttctgagatccaaggctgattgttgttaaaaaaaaaaaaaaaaaaaagtggcacatttaaaaaaatgtgtctgcatatgtggtgcatccttccatctccacaaaccatttgattcttgaaatattgtttgacctcattgctgtgtgtgaatatttctccacatgcttcagatgcacattcctagtctctgcttcctaaggggggaaccaccacacattggggggaaaaaagacattttcctacacccacccaccttgttgaaagggaggtaggtttggggcttcaggccaggcactgactatgaaacattagctgcagtgtgcaggacagctttgaggtccagctgaagtcaggaagcaaaacaaatgtagatgtcacttcaaacataatttcaactgtcaccagatcaactctacattcaaggagtgtggacgctgcagtgcagttgtgagggcagttagcagccgcctcttctgcatcctgtcaactctgattagttagagtttaggctcaaaagagttggtggactgagattgaaatttggttgtgcaagagaaaggaaaggagacacttagtaccaccagtttcagcaataaagaagggtcattctgtattcaaaattgtactgtagataaatcattcatgagattgtaaaaaatgtttgtcttgtgaccttgtgcttttgaagtcagacaaaaccgtgtaatcaacttgcacaaaaagagggtacacagtgaacatataaacacagacctaatcaaacaggagcagattcctcatggtgcttgtttattatatatatttaatcctgcttgacactttacccaagggagatggtcccttttatcagttgaatgttagcagcgttatttcagagtgtggtgactggttagagaaactcatgtactcaaccagccacagtttcaaacaaaatttttatgtgcaaaggacagcaaccttcttgtatgttaaaccaccagtacgctttgtacatctgtgataacgcctgttttatattcaaatgaacaaataaaagcttttattttt

SEQ ID NO: 81 - DNA, 7092 bp, Homo sapien
ggggggggagggaggtccctgcgcgcccgccgcccgcctcccgcgcccgcgccgccgcctcctcctcggtgcggttccgccgggcgcgaggagccgccgagacctccgcctgcgaacaaagaggaggccgtgcggggcgcggcgcccgcggagcatggcggaccgcagcctgggagggcatggcgctgcccctggaggtgcgggcgcgcctggccgagctggagctggagctgtcggaaggtgacatcacacaaaaaggatatgaaaagaagaggtcaaagttaattggagcctaccttccgcagcctccgacagcgaatggagctgccgtggttcggtgtagactgcagcacagtgaaggagcgccgaggagaacattccgctctgcccacatcggggtgtgcgacgtccgagaagctgcggctcgggagcgggtggccagcaccgcagggaaccggcctctgttttactttcgtttcggggtggaccaagctttgccgcaagaacgccgggctcctgtcactccttcctccgcctctcgctaccaccgccgacggtcttcagggtcacgagatgagcgctatcggtcagacgtccacacggaagctgtccaggcggctctggccaaacacaaagagcggaagatggcagtgcctatgccttccaaacgcaggtccctggtcgtgcagacctcgatggacgcctacacccctccagatacctcttctggctcagaagatgaaggctcagtgcagggggactcccagggcacccccacctccagccagggcagcatcaatatggagcactggatcagccaggccatccacggctccaccacgtccaccacctcctcgtcctctacgcagagcgggggcagcggggctgcccacaggctggcggacgtcatggctcagacccacatagaaaatcattctgcacctcctgacgtaaccacgtacacctcagagcactcgatacaggtggagagaccgcagggttccacggggtcccggacagcgcccaagtacggcaacgccgagctcatggagaccggggatggagtaccagtaagtagccgggtgtcagcaaaaatccagcagcttgtcaataccctcaaacgaccgaaacgaccacctttacgagaattctttgtcgatgactttgaagaattattagaagttcaacaaccggatccgaaccaaccaaagccggagggggcccagatgctggccatgcgcggagagcagctgggcgtggtcacgaactggccgccgtcgctggaggccgcactgcagaggtggggcaccatctcgcccaaggcgccctgcctgaccaccatggacaccaacgggaagcccctctacatcctcacttacggcaagctgtggacaagaagtatgaaggtcgcttacagcattctacacaaattaggcacaaagcaggaacccatggtccggcctggagatagggtggcactggtgttccccaacaatgatccggctgccttcatggcggctttctacggctgcctgctggccgaggtggtccccgtgcccatcgaggtgccactcaccaggaaggacgcagggagccagcagataggtttcttgcttggaagctgtggagttactgtagccttgactagtgacgcctgccataaaggacttccaaaaagcccaacgggagagatcccacagtttaaaggttggccaaagctgctgtggtttgtcacagagtctaaacatctctccaaaccgccccgagactggttcccacacattaaagatgccaataacgacactgcgtatattgagtacaagacgtgtaaggatggcagtgtgctgggtgtgacggtgacgaggactgcgctgctgacacactgccaggccctgacgcaggcgtgtggctacacggaagctgaaaccattgtgaatgtgctggatttcaagaaggacgtcgggctctggcatggcatcctgacaagcgtcatgaacatgatgcatgtgatcagcatcccgtactcgctgatgaaggtgaaccctctctcctggatccagaaggtctgccagtacaaagcaaaagtggcgtgtgtgaaatcgagggatatgcattgggcattagtagcacacagagatcagagagacatcaacctctcctctctgcgaatgctgatagtggcggacggcgcgaacccctggtctatttcttcttgcgatgcatttctcaatgtcttccaaagtaaaggccttcgacaggaggtcatctgtccttgtgccagctcgccagaggccctcactgtggccatccggaggcccacggatgacagtaaccagcccccgggccggggtgtcctctccatgcatggactgacctatggggtcattcgtgtggactcggaagagaagctgtccgtgctcaccgtgcaggatgtcggcctcgtgatgcctggagccatcatgtgttcagtgaagccagacggggttcctcagctgtgcagaacggatgagatcggggagctgtgtgtgtgtgcagttgcgacgggcacgtcctactatggcctctctggcatgaccaagaacacctttgaggtgtttcccatgacaagctccggggctccgatcagtgaatacccattcataaggacaggcttgctggggttcgtgggtcccggaggcctcgtcttcgtggtgggcaagatggatggcctcatggtggtcagcgggcgcaggcacaacgccgacgacatcgtggccactgcgctggccgtagaacccatgaagtttgtctaccggggaaggatagccgtgttctcggtgaccgtgctgcacgacgagaggatcgtgatcgtggctgagcagaggcctgactccacggaagaggacagtttccagtggatgagccgtgtgctgcaggcgattgacagtatacatcaagttggagtttattgcctggccttggtgccagcaaacaccctccccaaaaccccgcttggtgggatccatttatcagaaacaaaacagctttttctggagggctctctgcacccctgcaatgtcctaatgtgcccccacacctgcgtcacaaacttgcctaagcctcgacagaagcagccagaaatcggccctgcctctgtgatggtggggaacctggtctctgggaagagaatcgcccaggccagtggcagagacctgggtcagatcgaagataacgaccaggcacgcaagttcctgttcctctcagaggtcttgcagtggagagcacagaccaccccggaccacatcctctacacgctgctcaactgtcggggtgcgatagcgaactcgctgacctgcgtgcagctgcacaagagagctgagaagatcgccgtgatgctgatggagaggggccaccttcaggacggcgaccacgtggccttggtctaccccccaggaatagacctgatagcagcgttttatggttgcctgtacgcaggctgtgtgccaataaccgtccgtcccccgcacccacagaacatcgcgacgacgttgcctaccgtcaagatgattgtggaggtgagtcgctctgcctgtctgatgacgacacagctgatctgtaagttgctgcggtccagggaggcggcggcggctgtggacgtcaggacgtggcccctcatcctggacacagatgatttgccaaagaagcggcctgcccagatctgcaaaccttgcaacccagacactcttgcatatctcgacttcagcgtgtccacaactgggatgctagctggcgtaaagatgtctcacgcagccaccagtgccttctgccgttccattaagctgcagtgtgaactttacccctctagagaagtggccatctgcctggacccttactgtggactgggatttgtcctctggtgcctctgcagtgtgtattctgggcaccagtccatcctgatcccgccctctgagctggaaaccaaccccgccttgtggcttcttgccgtgagtcagtacaaagtccgagacacgttttgctcctactccgtgatggagctgtgcaccaaggggctgggctcgcaaacagagtccctcaaggcgcgagggctggacttgtcccgagtgaggacctgcgtggttgtggcggaagagaggcctcggatcgcactcacacagtcgttctcaaagctgtttaaggacctgggccttcacccgcgggccgtcagcacctcgttcggttgcagggtgaacctggcgatttgcttgcagggaacctcaggacctgacccaaccactgtctacgtggacatgagagccctgagacacgacagagtccgcttagtggaaagaggatcccctcatagtctgcccctgatggaatcgggaaagatacttccaggggttcggattataattgccaacccagaaacaaaaggaccgctgggggactcacaccttggagagatttgggttcacagtgcccacaatgccagcggttatttcactatttacggagacgaatccctccagtcagatcacttcaactcaagactaagttttggagacacccagaccatctgggcacgcacaggctacttggggttcctgcggagaactgagctcacagatgcaaatggagagcgccatgatgccctctacgtggtaggggcactggacgaagccatggagctgcggggcatgcggtaccacccaatcgacattgagacctcggtcatcagagcccataaaagcgttacggaatgtgctgtgtttacctggacaaatttgttggtggttgtggttgagctggatgggtcggaacaagaagccttggacctggttcccttggtgaccaacgtggtcctggaggagcactacctgatcgtcggagtggtggtcgtggtggacatcggcgtcatccccatcaactcccgtggggagaagcagcgcatgcacctgcgagacgggtttttggcagaccagctagaccccatctatgtggcctacaacatgtagtctcgtctcttggcttccatggacttttctagagatgtagacattgttctccgtgtccactgaagcgtgcagacacagggcaacactcaccagaatacagccatttgtggtgagagtggaggaggaagaggaggaggaagaggacttctcacagcagccacgattggcatgggggtgaaatgtgaatttaccactgaatttcgctcagaaggactttggattactgccttcagtttgttggaaaagcccatttcaaaaactttcttttcttttctttcttttttaattattggataataagtgctttcttcgtaaatgtggtattttgttaagccgaaatagcaattaaaaaaatatcctgccctccagatgggttcttttaaacaatttatgtagtgtgacaaagaattgttttctctgttttaatgtgtcatgaaatcttaatgacatggatctgttactaatttaagccattgctagatctcatccttttaggaaagtttgaggtacgagaaaaccttccaaatagcaccttccaattagataatagcagctttctttgtcagaaatgtgctgaagaaacaaaggctggtatacggccttcgaagttagtatagaatgagaagaaattataaataaggtgtatttcggcaattatcttgcaaatatctttgtactaaactaaaaagataaaataagttaacttcctcaatatgtaattatgtacaaaacgtttaatttattttgatctctttagaactataaaagagaaaaacattcaagaatattaaagtcttgtaatgtttgctaatataaaaaagtgttgtattatcttgcgtggatagtatcacaacaaatatatatatatgaaatataaattcactaatgaacaaaggagattttaaagtttaagatgcagaacttgtcacttgcatggtgtgccccccgtactcacatacactctgctgttgccagcagtcgcagaccgcaggagccctgtctaaaagtttcttctagaaccagagaccagcaagtgaaattattgccatctcaaggatggcaaaagaattcaaagctcaatgtgcactatttttttctttgctgtgggacaacagtgaatgtgtttatgccagcgtgtgctgatgatactgaggggctttaggttggcaaatagcactgttttcttagctgcaagaattcattgcacaatgtttttcatcatttttgttaatgtcatctttttttggtccttgctacgaaaaggaatgcgattctgtggtcattcgcactgggttgcattgattccccctctgatggccaatgtggagtggacaaagtgtccggaactcacatcggtgatcgtcccctcgtcttaagacccagcccgctctgtgtgagcctctggggctccctcgctcagtgagcacagttccccgggggttcatgccagagctccggctgaagcaagaagtcctccagctgcgtcgtttgccgcctgtggacgagtgcgccccagtttctgccctggcagctcctggccacaccttctcagagctcacctgtgcacttctaaattgaattggcccacggtgtccaaccaagaaggagcatctgcactccgagaaagatgtgttctgtaactgccccagtgtgaccccgcagtggctctcggtgctagatatgcatgactaagattgatgctgggcaaaatgtagatgatctttcattatgttgtgggcagcgtctttctctgcctttgctatatgcagtcagcagtaagccttttgctaaaagagttttgtttgacttctgagatccaaggctgattgttgttaaaaaaaaaaaaaaaaaaaagtggcacatttaaaaaaatgtgtctgcatatgtggtgcatccttccatctccacaaaccatttgattcttgaaatattgtttgacctcattgctgtgtgtgaatatttctccacatgcttcagatgcacattcctagtctctgcttcctaaggggggatgagcataagaagggataaggagggatgagcataaggagggatgagcataaggagggatgagcatactggatgggatgagcataag

SEQ ID NO: 82 - DNA, 8383 bp, Homo sapien
ggggggggagggaggtccctgcgcgcccgccgcccgcctcccgcgcccgcgccgccgcctcctcctcggtgcggttccgccgggcgcgaggagccgccgagacctccgcctgcgaacaaagaggaggccgtgcggggcgcggcgcccgcggagcatggcggaccgcagcctgggagggcatggcgctgcccctggaggtgcgggcgcgcctggccgagctggagctggagctgtcggaaggtgacatcacacaaaaaggatatgaaaagaagaggtcaaagttaattggagcctaccttccgcagcctccgacagcgaatggagctgccgtggttcggtgtagactgcagcacagtgaaggagcgccgaggagaacattccgctctgcccacatcggggtgtgcgacgtccgagaagctgcggctcgggagcgggtggccagcaccgcagggaaccggcctctgttttactttcgtttcggggtggaccaagctttgccgcaagaacgccgggctcctgtcactccttcctccgcctctcgctaccaccgccgacggtcttcagggtcacgagatgagcgctatcggtcagacgtccacacggaagctgtccaggcggctctggccaaacacaaagagcggaagatggcagtgcctatgccttccaaacgcaggtccctggtcgtgcagacctcgatggacgcctacacccctccagatacctcttctggctcagaagatgaaggctcagtgcagggggactcccagggcacccccacctccagccagggcagcatcaatatggagcactggatcagccaggccatccacggctccaccacgtccaccacctcctcgtcctctacgcagagcgggggcagcggggctgcccacaggctggcggacgtcatggctcagacccacatagaaaatcattctgcacctcctgacgtaaccacgtacacctcagagcactcgatacaggtggagagaccgcagggttccacggggtcccggacagcgcccaagtacggcaacgccgagctcatggagaccggggatggagtaccagtaagtagccgggtgtcagcaaaaatccagcagcttgtcaataccctcaaacgaccgaaacgaccacctttacgagaattctttgtcgatgactttgaagaattattagaagttcaacaaccggatccgaaccaaccaaagccggagggggcccagatgctggccatgcgcggagagcagctgggcgtggtcacgaactggccgccgtcgctggaggccgcactgcagaggtggggcaccatctcgcccaaggcgccctgcctgaccaccatggacaccaacgggaagcccctctacatcctcacttacggcaagctgtggacaagaagtatgaaggtcgcttacagcattctacacaaattaggcacaaagcaggaacccatggtccggcctggagatagggtggcactggtgttccccaacaatgatccggctgccttcatggcggctttctacggctgcctgctggccgaggtggtccccgtgcccatcgaggtgccactcaccaggaaggacgcagggagccagcagataggtttcttgcttggaagctgtggagttactgtagccttgactagtgacgcctgccataaaggacttccaaaaagcccaacgggagagatcccacagtttaaaggttggccaaagctgctgtggtttgtcacagagtctaaacatctctccaaaccgccccgagactggttcccacacattaaagatgccaataacgacactgcgtatattgagtacaagacgtgtaaggatggcagtgtgctgggtgtgacggtgacgaggactgcgctgctgacacactgccaggccctgacgcaggcgtgtggctacacggaagctgaaaccattgtgaatgtgctggatttcaagaaggacgtcgggctctggcatggcatcctgacaagcgtcatgaacatgatgcatgtgatcagcatcccgtactcgctgatgaaggtgaaccctctctcctggatccagaaggtctgccagtacaaagcaaaagtggcgtgtgtgaaatcgagggatatgcattgggcattagtagcacacagagatcagagagacatcaacctctcctctctgcgaatgctgatagtggcggacggcgcgaacccctggtctatttcttcttgcgatgcatttctcaatgtcttccaaagtaaaggccttcgacaggaggtcatctgtccttgtgccagctcgccagaggccctcactgtggccatccggaggcccacggatgacagtaaccagcccccgggccggggtgtcctctccatgcatggactgacctatggggtcattcgtgtggactcggaagagaagctgtccgtgctcaccgtgcaggatgtcggcctcgtgatgcctggagccatcatgtgttcagtgaagccagacggggttcctcagctgtgcagaacggatgagatcggggagctgtgtgtgtgtgcagttgcgacgggcacgtcctactatggcctctctggcatgaccaagaacacctttgaggtgtttcccatgacaagctccggggctccgatcagtgaatacccattcataaggacaggcttgctggggttcgtgggtcccggaggcctcgtcttcgtggtgggcaagatggatggcctcatggtggtcagcgggcgcaggcacaacgccgacgacatcgtggccactgcgctggccgtagaacccatgaagtttgtctaccggggaaggatagccgtgttctcggtgaccgtgctgcacgacgagaggatcgtgatcgtggctgagcagaggcctgactccacggaagaggacagtttccagtggatgagccgtgtgctgcaggttgccctccctcgccctgggcactggtcccctgtgtcttgtttctggcctccttacttcattcagatcatggtgtgaccagctgttgctttgcccatggggtggccctttttcccttcccttcatttgatcaggaactacatcaagtgtccagaaactagctcagcagatcgagggtgtagggaccaggaatttgcacagctggttcctaccggacaccttggggaggtcgaagtaagctttttgtttgatcttgagaacatgttatcttttctccaaagttccttttttactgtgtatggtcttccacaagccctgggtaacattattcagctttggtgagtttagtaggaaaatcctttctcttaccttggcatttttatgctgggaacagtgcttatactgcacagacttctgtgtattgtggatcatattttgcataatataaatacgtactgtttatacttcctcttataacatgatttcctctttattaactttctaggcgattgacagtatacatcaagttggagtttattgcctggccttggtgccagcaaacaccctccccaaaaccccgcttggtgggatccatttatcagaaacaaaacagctttttctggagggctctctgcacccctgcaatgtcctaatgtgcccccacacctgcgtcacaaacttgcctaagcctcgacagaagcagccagaaatcggccctgcctctgtgatggtggggaacctggtctctgggaagagaatcgcccaggccagtggcagagacctgggtcagatcgaagataacgaccaggcacgcaagttcctgttcctctcagaggtcttgcagtggagagcacagaccaccccggaccacatcctctacacgctgctcaactgtcggggtgcgatagcgaactcgctgacctgcgtgcagctgcacaagagagctgagaagatcgccgtgatgctgatggagaggggccaccttcaggacggcgaccacgtggccttggtctaccccccaggaatagacctgatagcagcgttttatggttgcctgtacgcaggctgtgtgccaataaccgtccgtcccccgcacccacagaacatcgcgacgacgttgcctaccgtcaagatgattgtggaggtgagtcgctctgcctgtctgatgacgacacagctgatctgtaagttgctgcggtccagggaggcggcggcggctgtggacgtcaggacgtggcccctcatcctggacacagatgatttgccaaagaagcggcctgcccagatctgcaaaccttgcaacccagacactcttgcatatctcgacttcagcgtgtccacaactgggatgctagctggcgtaaagatgtctcacgcagccaccagtgccttctgccgttccattaagctgcagtgtgaactttacccctctagagaagtggccatctgcctggacccttactgtggactgggatttgtcctctggtgcctctgcagtgtgtattctgggcaccagtccatcctgatcccgccctctgagctggaaaccaaccccgccttgtggcttcttgccgtgagtcagtacaaagtccgagacacgttttgctcctactccgtgatggagctgtgcaccaaggggctgggctcgcaaacagagtccctcaaggcgcgagggctggacttgtcccgagtgaggacctgcgtggttgtggcggaagagaggcctcggatcgcactcacacagtcgttctcaaagctgtttaaggacctgggccttcacccgcgggccgtcagcacctcgttcggttgcagggtgaacctggcgatttgcttgcagcctcacaggctgtggaccctggccgagcagggaacctcaggacctgacccaaccactgtctacgtggacatgagagccctgagacacgacagagtccgcttagtggaaagaggatcccctcatagtctgcccctgatggaatcgggaaagatacttccaggggttcggattataattgccaacccagaaacaaaaggaccgctgggggactcacaccttggagagatttgggttcacagtgcccacaatgccagcggttatttcactatttacggagacgaatccctccagtcagatcacttcaactcaagactaagttttggagacacccagaccatctgggcacgcacaggctacttggggttcctgcggagaactgagctcacagatgcaaatggagagcgccatgatgccctctacgtggtaggggcactggacgaagccatggagctgcggggcatgcggtaccacccaatcgacattgagacctcggtcatcagagcccataaaagcgttacggaatgtgctgtgtttacctggacaaatttgttggtggttgtggttgagctggatgggtcggaacaagaagccttggacctggttcccttggtgaccaacgtggtcctggaggagcactacctgatcgtcggagtggtggtcgtggtggacatcggcgtcatccccatcaactcccgtggggagaagcagcgcatgcacctgcgagacgggtttttggcagaccagctagaccccatctatgtggcctacaacatgtagtctcgtctcttggcttccatggacttttctagagatgtagacattgttctccgtgtccactgaagcgtgcagacacagggcaacactcaccagaatacagccatttgtggtgagagtggaggaggaagaggaggaggaagaggacttctcacagcagccacgattggcatgggggtgaaatgtgaatttaccactgaatttcgctcagaaggactttggattactgccttcagtttgttggaaaagcccatttcaaaaactttcttttcttttctttcttttttaattattggataataagtgctttcttcgtaaatgtggtattttgttaagccgaaatagcaattaaaaaaatatcctgccctccagatgggttcttttaaacaatttatgtagtgtgacaaagaattgttttctctgttttaatgtgtcatgaaatcttaatgacatggatctgttactaatttaagccattgctagatctcatccttttaggaaagtttgaggtacgagaaaaccttccaaatagcaccttccaattagataatagcagctttctttgtcagaaatgtgctgaagaaacaaaggctggtatacggccttcgaagttagtatagaatgagaagaaattataaataaggtgtatttcggcaattatcttgcaaatatctttgtactaaactaaaaagataaaataagttaacttcctcaatatgtaattatgtacaaaacgtttaatttattttgatctctttagaactataaaagagaaaaacattcaagaatattaaagtcttgtaatgtttgctaatataaaaaagtgttgtattatcttgcgtggatagtatcacaacaaatatatatatatgaaatataaattcactaatgaacaaaggagattttaaagtttaagatgcagaacttgtcacttgcatggtgtgccccccgtactcacatacactctgctgttgccagcagtcgcagaccgcaggagccctgtctaaaagtttcttctagaaccagagaccagcaagtgaaattattgccatctcaaggatggcaaaagaattcaaagctcaatgtgcactatttttttctttgctgtgggacaacagtgaatgtgtttatgccagcgtgtgctgatgatactgaggggctttaggttggcaaatagcactgttttcttagctgcaagaattcattgcacaatgtttttcatcatttttgttaatgtcatctttttttggtccttgctacgaaaaggaatgcgattctgtggtcattcgcactgggttgcattgattccccctctgatggccaatgtggagtggacaaagtgtccggaactcacatcggtgatcgtcccctcgtcttaagacccagcccgctctgtgtgagcctctggggctccctcgctcagtgagcacagttccccgggggttcatgccagagctccggctgaagcaagaagtcctccagctgcgtcgtttgccgcctgtggacgagtgcgccccagtttctgccctggcagctcctggccacaccttctcagagctcacctgtgcacttctaaattgaattggcccacggtgtccaaccaagaaggagcatctgcactccgagaaagatgtgttctgtaactgccccagtgtgaccccgcagtggctctcggtgctagatatgcatgactaagattgatgctgggcaaaatgtagatgatctttcattatgttgtgggcagcgtctttctctgcctttgctatatgcagtcagcagtaagccttttgctaaaagagttttgtttgacttctgagatccaaggctgattgttgttaaaaaaaaaaaaaaaaaaaagtggcacatttaaaaaaatgtgtctgcatatgtggtgcatccttccatctccacaaaccatttgattcttgaaatattgtttgacctcattgctgtgtgtgaatatttctccacatgcttcagatgcacattcctagtctctgcttcctaaggggggaaccaccacacattggggggaaaaaagacattttcctacacccacccaccttgttgaaagggaggtaggtttggggcttcaggccaggcactgactatgaaacattagctgcagtgtgcaggacagctttgaggtccagctgaagtcaggaagcaaaacaaatgtagatgtcacttcaaacataatttcaactgtcaccagatcaactctacattcaaggagtgtggacgctgcagtgcagttgtgagggcagttagcagccgcctcttctgcatcctgtcaactctgattagttagagtttaggctcaaaagagttggtggactgagattgaaatttggttgtgcaagagaaaggaaaggagacacttagtaccaccagtttcagcaataaagaagggtcattctgtattcaaaattgtactgtagataaatcattcatgagattgtaaaaaatgtttgtcttgtgaccttgtgcttttgaagtcagacaaaaccgtgtaatcaacttgcacaaaaagagggtacacagtgaacatataaacacagacctaatcaaacaggagcagattcctcatggtgcttgtttattatatatatttaatcctgcttgacactttacccaagggagatggtcccttttatcagttgaatgttagcagcgttatttcagagtgtggtgactggttagagaaactcatgtactcaaccagccacagtttcaaacaaaatttttatgtgcaaaggacagcaaccttcttgtatgttaaaccaccagtacgctttgtacatctgtgataacgcctgttttatattcaaatgaacaaataaaagcttttattttt

SEQ ID NO: 83 - DNA, 5209 bp, Homo sapien
tacaaactgctttgctccaccttccctctcccagcctccctgcactgccccttggggccaccatcggctgctccatgctgagaaatgcggctgtgacacccagcgctgtggaatgggactctccatgttgccaaattcaagccaaacaaactttctcatttctcatcagttgttctcagcattaaatagcgtgcacagctcctgtaaaagctctgagagtcactggcaccaccccataggtccctggcagaggagatagtggagcaagcacaccctcggccagctctgttcctccagagagccaagctgattcctccggagagccaagcagatttggatactctaggactattccatacatttcaaatgccgtaataaaagtataccaaatgcgcctgagacgtctatatctgtgatatgacagattcacaatgtgggctcacatgggccatgtagagcaacattttaacatcaccaggagcagtatgacaggaattaagcgccagcacgtcctctgggaaacagctcttagcatgctccataggcatgcggcagtcacaaagcaaaatccaggagaactgttgagaatttccaggaaaattctccaattttccctttcaatttaacataggttggccatactgaataaaatatgcgtttttttcctaactgacttactctcccacttagaacaatagtgagtttcctaaaatatctcctgcctcaagctgggatagaacatgtttgtcaggtgcgtgagagcagatacgagcagccctggagcctggtctccatccagcccactctgcccgggaaccttctggcctcctcagccaagcagacctcaagtaccaggctctgtgaatgtcagggcccttaaacagttagttccaaaagccattaaatatcctttaaactgtaaagcaccgggtttttgcttctgccagttgggcagacttaatcctctggtgcctgtcctgctgaaagatgactcgatcccagataaaacatttctgagtgaatcttccatattccagaagacttttccctgcacatgggttagccatggctgtatggcagccagcccatgctcagtgctttagagagagttgttacaatgtccccacatctgcgttcaaggggctggctcagctggggcaagcagcttagctgggcacaggactggtggctcttctccacgtgtttcttatcctccggacccaagggccagcccaggtgtgtccccatcacacgccaggagaagcccccatatccagccctcctggagcctccaccggcattcatctccctaacacaggctgaccaggttccatgctgagcccaagccccaggactgggaaacacacccccactcaggcgcactgcacagacagaggagcaggcacccatgcccttggcctccgcacgcacggcctcagcagcagagctggactcgggtgcacagacagagaggagtaggcacccatgccctaggcgtccacacgcacggccctcagcagcagagctggactcgggcgcacagacaggagtaggcacccatgccctcggcgtccacacgcatggccctcagcagcagagctggactcggggccaccgcacagacagagaggagtaggcacccctgccctcggcctccgcacgcacggccctcagcagcagagctgggggtctggaagcaggaggcacagggctgccttgagggtacgaggctgatggcacactgcactgttcagtgagggcattggtcctccaggcagcagcaaagaggcagcactggaacacagactccgctggccaggtggagtgatgctgtgctagaaatgggaactcgggaagatggtgaaacagtcgcagaagccaccgagagagaaggctggtaggaaacaccgacaggtgctgtcgccaggaagtctgtatggggaacgattagtgggcggcagacggaggacgtggagaggccggaggagactgtcgggcagtgctcaggcaggtcagagagagccaagtggaactttgaaaccacggctattaaataaagcattaataaacatataatgatggctttcttttctgtcttttagtgctgtgtttacctggacaaatttgttggtggttgtggttgagctggatgggtcggaacaagaagccttggacctggttcccttggtgaccaacgtggtcctggaggagcactacctgatcgtcggagtggtggtcgtggtggacatcggcgtcatccccatcaactcccgtggggagaagcagcgcatgcacctgcgagacgggtttttggcagaccagctagaccccatctatgtggcctacaacatgtagtctcgtctcttggcttccatggacttttctagagatgtagacattgttctccgtgtccactgaagcgtgcagacacagggcaacactcaccagaatacagccatttgtggtgagagtggaggaggaagaggaggaggaagaggacttctcacagcagccacgattggcatgggggtgaaatgtgaatttaccactgaatttcgctcagaaggactttggattactgccttcagtttgttggaaaagcccatttcaaaaactttcttttcttttctttcttttttaattattggataataagtgctttcttcgtaaatgtggtattttgttaagccgaaatagcaattaaaaaaatatcctgccctccagatgggttcttttaaacaatttatgtagtgtgacaaagaattgttttctctgttttaatgtgtcatgaaatcttaatgacatggatctgttactaatttaagccattgctagatctcatccttttaggaaagtttgaggtacgagaaaaccttccaaatagcaccttccaattagataatagcagctttctttgtcagaaatgtgctgaagaaacaaaggctggtatacggccttcgaagttagtatagaatgagaagaaattataaataaggtgtatttcggcaattatcttgcaaatatctttgtactaaactaaaaagataaaataagttaacttcctcaatatgtaattatgtacaaaacgtttaatttattttgatctctttagaactataaaagagaaaaacattcaagaatattaaagtcttgtaatgtttgctaatataaaaaagtgttgtattatcttgcgtggatagtatcacaacaaatatatatatatgaaatataaattcactaatgaacaaaggagattttaaagtttaagatgcagaacttgtcacttgcatggtgtgccccccgtactcacatacactctgctgttgccagcagtcgcagaccgcaggagccctgtctaaaagtttcttctagaaccagagaccagcaagtgaaattattgccatctcaaggatggcaaaagaattcaaagctcaatgtgcactatttttttctttgctgtgggacaacagtgaatgtgtttatgccagcgtgtgctgatgatactgaggggctttaggttggcaaatagcactgttttcttagctgcaagaattcattgcacaatgtttttcatcatttttgttaatgtcatctttttttggtccttgctacgaaaaggaatgcgattctgtggtcattcgcactgggttgcattgattccccctctgatggccaatgtggagtggacaaagtgtccggaactcacatcggtgatcgtcccctcgtcttaagacccagcccgctctgtgtgagcctctggggctccctcgctcagtgagcacagttccccgggggttcatgccagagctccggctgaagcaagaagtcctccagctgcgtcgtttgccgcctgtggacgagtgcgccccagtttctgccctggcagctcctggccacaccttctcagagctcacctgtgcacttctaaattgaattggcccacggtgtccaaccaagaaggagcatctgcactccgagaaagatgtgttctgtaactgccccagtgtgaccccgcagtggctctcggtgctagatatgcatgactaagattgatgctgggcaaaatgtagatgatctttcattatgttgtgggcagcgtctttctctgcctttgctatatgcagtcagcagtaagccttttgctaaaagagttttgtttgacttctgagatccaaggctgattgttgttaaaaaaaaaaaaaaaaaaaagtggcacatttaaaaaaatgtgtctgcatatgtggtgcatccttccatctccacaaaccatttgattcttgaaatattgtttgacctcattgctgtgtgtgaatatttctccacatgcttcagatgcacattcctagtctctgcttcctaaggggggaaccaccacacattggggggaaaaaagacattttcctacacccacccaccttgttgaaagggaggtaggtttggggcttcaggccaggcactgactatgaaacattagctgcagtgtgcaggacagctttgaggtccagctgaagtcaggaagcaaaacaaatgtagatgtcacttcaaacataatttcaactgtcaccagatcaactctacattcaaggagtgtggacgctgcagtgcagttgtgagggcagttagcagccgcctcttctgcatcctgtcaactctgattagttagagtttaggctcaaaagagttggtggactgagattgaaatttggttgtgcaagagaaaggaaaggagacacttagtaccaccagtttcagcaataaagaagggtcattctgtattcaaaattgtactgtagataaatcattcatgagattgtaaaaaatgtttgtcttgtgaccttgtgcttttgaagtcagacaaaaccgtgtaatcaacttgcacaaaaagagggtacacagtgaacatataaacacagacctaatcaaacaggagcagattcctcatggtgcttgtttattatatatatttaatcctgcttgacactttacccaagggagatggtcccttttatcagttgaatgttagcagcgttatttcagagtgtggtgactggttagagaaactcatgtactcaaccagccacagtttcaaacaaaatttttatgtgcaaaggacagcaaccttcttgtatgttaaaccaccagtacgctttgtacatctgtgataacgcctgttttatattcaaatgaacaaataaaagcttttattttt

SEQ ID NO: 84 - DNA, 6464 bp, Homo sapien
ggggggggagggaggtccctgcgcgcccgccgcccgcctcccgcgcccgcgccgccgcctcctcctcggtgcggttccgccgggcgcgaggagccgccgagacctccgcctgcgaacaaagaggaggccgtgcggggcgcggcgcccgcggagcatggcggaccgcagcctgggagggcatggcgctgcccctggaggtgcgggcgcgcctggccgagctggagctggagctgtcggaaggtgacatcacacaaaaaggatatgaaaagaagaggtcaaagttaattggagcctaccttccgcagcctccgacagcgaatggagctgccgtggttcggtgtagactgcagcacagtgaaggagcgccgaggagaacattccgctctgcccacatcggggtgtgcgacgtccgagaagctgcggctcgggagcgggtggccagcaccgcagggaaccggcctctgttttactttcgtttcggggtggaccaagctttgccgcaagaacgccgggctcctgtcactccttcctccgcctctcgctaccaccgccgacggtcttcagggtcacgagatgagcgctatcggtcagacgtccacacggaagctgtccaggcggctctggccaaacacaaagagcggaagatggcagtgcctatgccttccaaacgcaggtccctggtcgtgcagacctcgatggacgcctacacccctccagatacctcttctggctcagaagatgaaggctcagtgcagggggactcccagggcacccccacctccagccagggcagcatcaatatggagcactggatcagccaggccatccacggctccaccacgtccaccacctcctcgtcctctacgcagagcgggggcagcggggctgcccacaggctggcggacgtcatggctcagacccacatagaaaatcattctgcacctcctgacgtaaccacgtacacctcagagcactcgatacaggtggagagaccgcagggttccacggggtcccggacagcgcccaagtacggcaacgccgagctcatggagaccggggatggagtaccagtaagtagccgggtgtcagcaaaaatccagcagcttgtcaataccctcaaacgaccgaaacgaccacctttacgagaattctttgtcgatgactttgaagaattattagaagttcaacaaccggatccgaaccaaccaaagccggagggggcccagatgctggccatgcgcggagagcagctgggcgtggtcacgaactggccgccgtcgctggaggccgcactgcagaggtggggcaccatctcgcccaaggcgccctgcctgaccaccatggacaccaacgggaagcccctctacatcctcacttacggcaagctgtggacaagaagtatgaaggtcgcttacagcattctacacaaattaggcacaaagcaggaacccatggtccggcctggagatagggtggcactggtgttccccaacaatgatccggctgccttcatggcggctttctacggctgcctgctggccgaggtggtccccgtgcccatcgaggtgccactcaccaggaaggacgcagggagccagcagataggtttcttgcttggaagctgtggagttactgtagccttgactagtgacgcctgccataaaggacttccaaaaagcccaacgggagagatcccacagtttaaaggttggccaaagctgctgtggtttgtcacagagtctaaacatctctccaaaccgccccgagactggttcccacacattaaagatgccaataacgacactgcgtatattgagtacaagacgtgtaaggatggcagtgtgctgggtgtgacggtgacgaggactgcgctgctgacacactgccaggccctgacgcaggcgtgtggctacacggaagctgaaaccattgtgaatgtgctggatttcaagaaggacgtcgggctctggcatggcatcctgacaagcgtcatgaacatgatgcatgtgatcagcatcccgtactcgctgatgaaggtgaaccctctctcctggatccagaaggtctgccagtacaaagcaaaagtggcgtgtgtgaaatcgagggatatgcattgggcattagtagcacacagagatcagagagacatcaacctctcctctctgcgaatgctgatagtggcggacggcgcgaacccctggtctatttcttcttgcgatgcatttctcaatgtcttccaaagtaaaggccttcgacaggaggtcatctgtccttgtgccagctcgccagaggccctcactgtggccatccggaggcccacggatgacagtaaccagcccccgggccggggtgtcctctccatgcatggactgacctatggggtcattcgtgtggactcggaagagaagctgtccgtgctcaccgtgcaggatgtcggcctcgtgatgcctggagccatcatgtgttcagtgaagccagacggggttcctcagctgtgcagaacggatgagatcggggagctgtgtgtgtgtgcagttgcgacgggcacgtcctactatggcctctctggcatgaccaagaacacctttgaggtgtttcccatgacaagctccggggctccgatcagtgaatacccattcataaggacaggcttgctggggttcgtgggtcccggaggcctcgtcttcgtggtgggcaagatggatggcctcatggtggtcagcgggcgcaggcacaacgccgacgacatcgtggccactgcgctggccgtagaacccatgaagtttgtctaccggggaaggatagccgtgttctcggtgaccgtgctgcacgacgagaggatcgtgatcgtggctgagcagaggcctgactccacggaagaggacagtttccagtggatgagccgtgtgctgcaggttgccctccctcgccctgggcactggtcccctgtgtcttgtttctggcctccttacttcattcagatcatggtgtgaccagctgttgctttgcccatggggtggccctttttcccttcccttcatttgatcaggaactacatcaagtgtccagaaactagctcagcagatcgagggtgtagggaccaggaatttgcacagctggttcctaccggacaccttggggaggtcgaagtaagctttttgtttgatcttgagaacatgttatcttttctccaaagttccttttttactgtgtatggtcttccacaagccctgggtaacattattcagctttggtgagtttagtaggaaaatcctttctcttaccttggcatttttatgctgggaacagtgcttatactgcacagacttctgtgtattgtggatcatattttgcataatataaatacgtactgtttatacttcctcttataacatgatttcctctttattaactttctaggcgattgacagtatacatcaagttggagtttattgcctggccttggtgccagcaaacaccctccccaaaaccccgcttggtgggatccatttatcagaaacaaaacagctttttctggagggctctctgcacccctgcaatgtcctaatgtgcccccacacctgcgtcacaaacttgcctaagcctcgacagaagcagccagaaatcggccctgcctctgtgatggtggggaacctggtctctgggaagagaatcgcccaggccagtggcagagacctgggtcagatcgaagataacgaccaggcacgcaagttcctgttcctctcagaggtcttgcagtggagagcacagaccaccccggaccacatcctctacacgctgctcaactgtcggggtgcgatagcgaactcgctgacctgcgtgcagctgcacaagagagctgagaagatcgccgtgatgctgatggagaggggccaccttcaggacggcgaccacgtggccttggtctaccccccaggaatagacctgatagcagcgttttatggttgcctgtacgcaggctgtgtgccaataaccgtccgtcccccgcacccacagaacatcgcgacgacgttgcctaccgtcaagatgattgtggaggtgagtcgctctgcctgtctgatgacgacacagctgatctgtaagttgctgcggtccagggaggcggcggcggctgtggacgtcaggacgtggcccctcatcctggacacagatgatttgccaaagaagcggcctgcccagatctgcaaaccttgcaacccagacactcttgcatatctcgacttcagcgtgtccacaactgggatgctagctggcgtaaagatgtctcacgcagccaccagtgccttctgccgttccattaagctgcagtgtgaactttacccctctagagaagtggccatctgcctggacccttactgtggactgggatttgtcctctggtgcctctgcagtgtgtattctgggcaccagtccatcctgatcccgccctctgagctggaaaccaaccccgccttgtggcttcttgccgtgagtcagtacaaagtccgagacacgttttgctcctactccgtgatggagctgtgcaccaaggggctgggctcgcaaacagagtccctcaaggcgcgagggctggacttgtcccgagtgaggacctgcgtggttgtggcggaagagaggcctcggatcgcactcacacagtcgttctcaaagctgtttaaggacctgggccttcacccgcgggccgtcagcacctcgttcggttgcagggtgaacctggcgatttgcttgcagggaacctcaggacctgacccaaccactgtctacgtggacatgagagccctgagacacgacagagtccgcttagtggaaagaggatcccctcatagtctgcccctgatggaatcgggaaagatacttccaggggttcggattataattgccaacccagaaacaaaaggaccgctgggggactcacaccttggagagatttgggttcacagtgcccacaatgccagcggttatttcactatttacggagacgaatccctccagtcagatcacttcaactcaagactaagttttggagacacccagaccatctgggcacgcacaggctacttggggttcctgcggagaactgagctcacagatgcaaatggagagcgccatgatgccctctacgtggtaggggcactggacgaagccatggagctgcggggcatgcggtaccacccaatcgacattgagacctcggtcatcagagcccataaaagcgttacggaatgtgctgtgtttacctggacaaatttgttggtggttgtggttgagctggatgggtcggaacaagaagccttggacctggttcccttggtgaccaacgtggtcctggaggagcactacctgatcgtcggagtggtggtcgtggtggacatcggcgtcatccccatcaactcccgtggggagaagcagcgcatgcacctgcgagacgggtttttggcagaccagctagaccccatctatgtggcctacaacatgtagtctcgtctcttggcttccatggacttttctagagatgtagacattgttctccgtgtccactgaagcgtgcagacacagggcaacactcaccagaatacagccatttgtggtgagagtggaggaggaagaggaggaggaagaggacttctcacagcagccacgattggcatgggggtgaaatgtgaatttaccactgaatttcgctcagaaggactttggattactgccttcagtttgttggaaaagcccatttcaaaaactttcttttcttttctttcttttttaattattggataataagtgctttcttcgtaaatgtggtattttgttaagccgaaatagcaattaaaaaaatatcctgccctccagatgggttcttttaaacaatttatgtagtgtgacaaagaattgttttctctgttttaatgtgtcatgaaatcttaatgacatggatctgttactaatttaagccattgctagatctcatccttttaggaaagtttgaggtacgagaaaaccttccaaatagcaccttccaattagataatagcagctttctttgtcagaaatgtgctgaagaaacaaaggctggtatacggccttcgaagttagtatagaatgagaagaaattataaataaggtgtatttcggcaattatcttgcaaatatctttgtactaaactaaaaagataaaataagttaacttcctcaatatgtaattatgtacaaaacgtttaatttattttgatctctttagaactataaaagagaaaaacattcaagaatattaaagtcttgtaatgtttatgcaccaaagtgagcgtttccaaatgttacacacatcttatagtttctcatcctgactaatatgactaaaacgtactactggttttcattctttggaggtgacccaaaatgtttattcaagcaaaggaaaaagccatctcttgtgtaaatggtgatcc

SEQ ID NO: 85 - DNA, 5622 bp, Homo sapien
ggggggggagggaggtccctgcgcgcccgccgcccgcctcccgcgcccgcgccgccgcctcctcctcggtgcggttccgccgggcgcgaggagccgccgagacctccgcctgcgaacaaagaggaggccgtgcggggcgcggcgcccgcggagcatggcggaccgcagcctgggagggcatggcgctgcccctggaggtgcgggcgcgcctggccgagctggagctggagctgtcggaaggtgacatcacacaaaaaggatatgaaaagaagaggtcaaagttaattggagcctaccttccgcagcctccgacagcgaatggagctgccgtggttcggtgtagactgcagcacagtgaaggagcgccgaggagaacattccgctctgcccacatcggggtgtgcgacgtccgagaagctgcggctcgggagcgggtggccagcaccgcagggaaccggcctctgttttactttcgtttcggggtggaccaagctttgccgcaagaacgccgggctcctgtcactccttcctccgcctctcgctaccaccgccgacggtcttcagggtcacgagatgagcgctatcggtcagacgtccacacggaagctgtccaggcggctctggccaaacacaaagagcggaagatggcagtgcctatgccttccaaacgcaggtccctggtcgtgcagacctcgatggacgcctacacccctccagatacctcttctggctcagaagatgaaggctcagtgcagggggactcccagggcacccccacctccagccagggcagcatcaatatggagcactggatcagccaggccatccacggctccaccacgtccaccacctcctcgtcctctacgcagagcgggggcagcggggctgcccacaggctggcggacgtcatggctcagacccacatagaaaatcattctgcacctcctgacgtaaccacgtacacctcagagcactcgatacaggtggagagaccgcagggttccacggggtcccggacagcgcccaagtacggcaacgccgagctcatggagaccggggatggagtaccagtaagtagccgggtgtcagcaaaaatccagcagcttgtcaataccctcaaacgaccgaaacgaccacctttacgagaattctttgtcgatgactttgaagaattattagaagttcaacaaccggatccgaaccaaccaaagccggagggggcccagatgctggccatgcgcggagagcagctgggcgtggtcacgaactggccgccgtcgctggaggccgcactgcagaggtggggcaccatctcgcccaaggcgccctgcctgaccaccatggacaccaacgggaagcccctctacatcctcacttacggcaagctgtggacaagaagtatgaaggtcgcttacagcattctacacaaattaggcacaaagcaggaacccatggtccggcctggagatagggtggcactggtgttccccaacaatgatccggctgccttcatggcggctttctacggctgcctgctggccgaggtggtccccgtgcccatcgaggtgccactcaccaggaaggacgcagggagccagcagataggtttcttgcttggaagctgtggagttactgtagccttgactagtgacgcctgccataaaggacttccaaaaagcccaacgggagagatcccacagtttaaaggttggccaaagctgctgtggtttgtcacagagtctaaacatctctccaaaccgccccgagactggttcccacacattaaagatgccaataacgacactgcgtatattgagtacaagacgtgtaaggatggcagtgtgctgggtgtgacggtgacgaggactgcgctgctgacacactgccaggccctgacgcaggcgtgtggctacacggaagctgaaaccattgtgaatgtgctggatttcaagaaggacgtcgggctctggcatggcatcctgacaagcgtcatgaacatgatgcatgtgatcagcatcccgtactcgctgatgaaggtgaaccctctctcctggatccagaaggtctgccagtacaaagcaaaagtggcgtgtgtgaaatcgagggatatgcattgggcattagtagcacacagagatcagagagacatcaacctctcctctctgcgaatgctgatagtggcggacggcgcgaacccctggtctatttcttcttgcgatgcatttctcaatgtcttccaaagtaaaggccttcgacaggaggtcatctgtccttgtgccagctcgccagaggccctcactgtggccatccggaggcccacggatgacagtaaccagcccccgggccggggtgtcctctccatgcatggactgacctatggggtcattcgtgtggactcggaagagaagctgtccgtgctcaccgtgcaggatgtcggcctcgtgatgcctggagccatcatgtgttcagtgaagccagacggggttcctcagctgtgcagaacggatgagatcggggagctgtgtgtgtgtgcagttgcgacgggcacgtcctactatggcctctctggcatgaccaagaacacctttgaggtgtttcccatgacaagctccggggctccgatcagtgaatacccattcataaggacaggcttgctggggttcgtgggtcccggaggcctcgtcttcgtggtgggcaagatggatggcctcatggtggtcagcgggcgcaggcacaacgccgacgacatcgtggccactgcgctggccgtagaacccatgaagtttgtctaccggggaaggatagccgtgttctcggtgaccgtgctgcacgacgagaggatcgtgatcgtggctgagcagaggcctgactccacggaagaggacagtttccagtggatgagccgtgtgctgcaggttgccctccctcgccctgggcactggtcccctgtgtcttgtttctggcctccttacttcattcagatcatggtgtgaccagctgttgctttgcccatggggtggccctttttcccttcccttcatttgatcaggaactacatcaagtgtccagaaactagctcagcagatcgagggtgtagggaccaggaatttgcacagctggttcctaccggacaccttggggaggtcgaagtaagctttttgtttgatcttgagaacatgttatcttttctccaaagttccttttttactgtgtatggtcttccacaagccctgggtaacattattcagctttggtgagtttagtaggaaaatcctttctcttaccttggcatttttatgctgggaacagtgcttatactgcacagacttctgtgtattgtggatcatattttgcataatataaatacgtactgtttatacttcctcttataacatgatttcctctttattaactttctaggcgattgacagtatacatcaagttggagtttattgcctggccttggtgccagcaaacaccctccccaaaaccccgcttggtgggatccatttatcagaaacaaaacagctttttctggagggctctctgcacccctgcaatgtcctaatgtgcccccacacctgcgtcacaaacttgcctaagcctcgacagaagcagccagaaatcggccctgcctctgtgatggtggggaacctggtctctgggaagagaatcgcccaggccagtggcagagacctgggtcagatcgaagataacgaccaggcacgcaagttcctgttcctctcagaggtcttgcagtggagagcacagaccaccccggaccacatcctctacacgctgctcaactgtcggggtgcgatagcgaactcgctgacctgcgtgcagctgcacaagagagctgagaagatcgccgtgatgctgatggagaggggccaccttcaggacggcgaccacgtggccttggtctaccccccaggaatagacctgatagcagcgttttatggttgcctgtacgcaggctgtgtgccaataaccgtccgtcccccgcacccacagaacatcgcgacgacgttgcctaccgtcaagatgattgtggaggtgagtcgctctgcctgtctgatgacgacacagctgatctgtaagttgctgcggtccagggaggcggcggcggctgtggacgtcaggacgtggcccctcatcctggacacagatgatttgccaaagaagcggcctgcccagatctgcaaaccttgcaacccagacactcttgcatatctcgacttcagcgtgtccacaactgggatgctagctggcgtaaagatgtctcacgcagccaccagtgccttctgccgttccattaagctgcagtgtgaactttacccctctagagaagtggccatctgcctggacccttactgtggactgggatttgtcctctggtgcctctgcagtgtgtattctgggcaccagtccatcctgatcccgccctctgagctggaaaccaaccccgccttgtggcttcttgccgtgagtcagtacaaagtccgagacacgttttgctcctactccgtgatggagctgtgcaccaaggggctgggctcgcaaacagagtccctcaaggcgcgagggctggacttgtcccgagtgaggacctgcgtggttgtggcggaagagaggcctcggatcgcactcacacagtcgttctcaaagctgtttaaggacctgggccttcacccgcgggccgtcagcacctcgttcggttgcagggtgaacctggcgatttgcttgcagggaacctcaggacctgacccaaccactgtctacgtggacatgagagccctgagacacgacagagtccgcttagtggaaagaggatcccctcatagtctgcccctgatggaatcgggaaagatacttccaggggttcggattataattgccaacccagaaacaaaaggaccgctgggggactcacaccttggagagatttgggttcacagtgcccacaatgccagcggttatttcactatttacggagacgaatccctccagtcagatcacttcaactcaagactaagttttggagacacccagaccatctgggcacgcacaggctacttggggttcctgcggagaactgagctcacagatgcaaatggagagcgccatgatgccctctacgtggtaggggcactggacgaagccatggagctgcggggcatgcggtaccacccaatcgacattgagacctcggtcatcagagcccataaaagcgttacggaatggtaagtcgtgagcttgcagcttgtacccaaatcaggagcagagtttgtgaagcattgagaatgtggagagcacggcggtggaggagagttttgttaaggtagggaagggggtgcgattcaacatttgactataaatctttatcttttggggttaaagcaacaaaagaacatgccacatgtagagttaatgtaccatatattacctgaaaacgatagacttctattgccgtgaaaactacttgacagcattttccaggaagccaaattgtttggtttttaatttacaaaatcatgatataggaagaaaacaaacctcacacatatgtaggcacagaaaatacttttatgactgttgacttgggaactggaagtaaca

SEQ ID NO: 86 - DNA, 945 bp, Homo sapien
ggggggggagggaggtccctgcgcgcccgccgcccgcctcccgcgcccgcgccgccgcctcctcctcggtgcggttccgccgggcgcgaggagccgccgagacctccgcctgcgaacaaagaggaggccgtgcggggcgcggcgcccgcggagcatggcggaccgcagcctgggagggcatggcgctgcccctggaggtgcgggcgcgcctggccgagctggagctggagctgtcggaaggtgacatcacacaaaaaggatatgaaaagaagaggtcaaagttaattggagcctaccttccgcagcctccgagggtggaccaagctttgccgcaagaacgccgggctcctgtcactccttcctccgcctctcgctaccaccgccgacggtcttcagggtcacgagatgagcgctatcggtcaggtaagcacggggtggggtgatacaatacgtccatctgccacctgtgccaggacggtgcctgtgcccagccactgggcgaggcagaagtgcagtgggcgtggacctgcagcacgcgaggggcctccagctttctgcacggacacaccctctcgggagacgccagtgtccggtaaatagctcttcacgtggtttacaagcccatgttggctactattcagaatttcatattaattaaaaagattataatctcgtgccaaatttttcttttttaggtgtcactgttaaataactttttaatcgtggttgctagtatagttttttctttttcttaccatcagtgatttgttttctaggtctacttttctaaacagaaatgaaaaccatacattgttatgtgtttcctgtctttcatctgtgttttatgatgccgtctgcaaagggttgtctggagactgagttgccagtgccacctgggcttggccagctgaaatttcattaatttagcaacagaaaacttaggct

SEQ ID NO: 87 - DNA, 522 bp, Homo sapien
  misc_feature (251)..(251): n=a, c, g or t
  misc_feature (254)..(254): n=a, c, g or t
tcagcaccacagaacacataggtcttaattctcagcccttaaaacccagttcagcccaccagacattatttaaaaataatccaactgagacatctttgtggatctctaccaaaaagatagctttgtcctcccacccattgctttagcagcctgtataggggcacccagagggccagcccaccacacctggggcctccactttgaatccaccaggcccactctaatgggacagggaccttgggccagcgaanagnaaatgtattactgcaacagccccgtggtttcagatccttgcagtagcaggttctgggcatgtgtccccatcacccttctccaacagaaaatagtttatttttattttttcatggctggcagcaaggcagcacctgtggtaacctcgttagtcaattccaagagctcctcagagaagggggaaagcctgccaatttagcaaggatttttggtctccagtagctatgaagtgtcggggggattggggaaataagccccaggaaccagaga

SEQ ID NO: 88 - DNA, 521 bp, Homo sapien
tcagcaccacagaacacataggtcttaattctcagcccttaaaacccagttcagcccaccagacattatttaaaaataatccaactgagacatctttgtggatctctaccaaaaagatagctttgtcctcccacccattgctttagcagcctgtataggggcacccagagggccagcccaccacacctggggcctccactttgaatccaccaggcccactctaatgggacagggaccttgggccagcgaagcagaaatgtattactgcaacagccccgtggtttcagatccttgcagtagcaggttctgggcatgtgtccccatcacccttctccaacagaaaatagtttatttttattttttcatggctggcagcaaggcagcacctgtggtaacctcgttagtcaattccaagagctcctcagagaagggggaaagcctgccaatttagcaaggatttttggtctccagtagctatgaagtgtgggggggattggggaaataagcccaggagcaagaga

SEQ ID NO: 89 - DNA, 492 bp, Homo sapien
agctgccgcgcctagcccttcatgaggttttatagtgaatgaattatttttctataaagtttatcaatatttattttggaaagctgctgaaaatgtctttttcaaaattaattatgcttaagatgtatggcattaaattcaattttatgaggctttctgacatatttactaaaaaaaacctggaactgagactgaatttggaagacatttaattttgtagtgagatatctatattgtagatattgtacttttaaaacctgtcattaagtgtttggcatgtggttaatactttctctttagtcacaactggtattttaataaatgttataaacgtaagtgccaagatatgcatcactaactgttctatgaaatttgtctacttctcctttatgttcccaaagtcacagagaaagcagtgtactttatgacagtatatttatctttttatcattatgaattataagcagtgttaattttgagaaataaaagtcc

SEQ ID NO: 90 - DNA, 1108 bp, Homo sapien
agctgccgcgcctagcccttcatgaggttttatagtgaatgaattatttttctataaagtttatcaatatttattttggaaagctgctgaaaatgtctttttcaaaattaattatgcttaagatgtatggcattaaattcaattttatgaggctttctgacatatttactaaaaaaaacctggaactgagactgaatttggaagacatttaattttgtagtgagatatctatattgtagatattgtacttttaaaacctgtcattaagtgtttggcatgtggttaatactttctctttagtcacaactggtattttaataaatgttataaacgtaagtgccaagatatgcatcactaactgttctatgaaatttgtctacttctcctttatgttcccaaagtcacagagaaagcagtgtactttatgacagtatatttatctttttatcattatgaattataagcagtgttaattttgagaaataaaagtccaaaagaatgatttatgagtttaagttactttaaggattatatctgttgtatggtaaataaaataatgatattatttcagctaacatttgaaaatataaagaagtaatccttgtggtttatacaacagttaatacaaatgtttatccattgttagcctgtcgtgtcttcaaattccgaaagacatatgcttagcatttgtaaggggtttgaaaacattttagttcccaggacctccctttactgttactctctttggtaatgtctcaatagatcatcccacaccagattcttgctggcattatagccgcttgtgatgaaagattactcattttaatcatcaagaaagatactcgtttcaatctttaagagctctttagtttgagtctttaggtcttgtagtttgagtctttagttctctaagaaatcttgatttatagtgatttatgaacatatgttttatcacttaggctttctggcatttgttttgtcactacttgagcttgtattcagacatatatctctttttcttgctttttaatcttaaagtgtaattaaaacaatgcacacagaaaacctttcgaatagtactgagaaatataaaataaaaagtgatggt

SEQ ID NO: 91 - DNA, 1115 bp, Homo sapien
agctgccgcgcctagcccttcatgaggttttatagtgaatgaattatttttctataaagtttatcaatatttattttggaaagctgctgaaaatgtctttttcaaaattaattatgcttaagatgtatggcattaaattcaattttatgaggctttctgacatatttactaaaaaaacctggaactgagactgaatttggaagacatttaattttgtagtgagatatctatattgtagatattgtacttttaaaacctgtcattaagtgtttggcatgtggttaatactttctctttagtcacaactggtattttaataaatgttataaacgtaagtgccaagatatgcatcactaactgttctatgaaatttgtctacttctcctttatgttcccaaagtcacagagaaagcagtgtactttatgacagtatatttatctttttatcattatgaattataagcagtgttaattttgagaaataaaagtccaaaagaattattatgagtttaagttactttaggattatatctgttgtatggtaaataaaataatgatattatttcagctaacatttgaaaatataaagaagtaatccttgtggtttatacaaacagttaatacaaaatgtttatccattgttagcctgtcgttgtgtcttcaaaattccgaaagacatatgcttagcatttgtaaggggtttgaaaacattttagttcccaggacctccctttactgttactctctttggtaatgtctcaatagatcatcccacaccagattcttgctggcattatagccgcttgtgatgaaagattactcattttaatcatcaagaaagatactcgtttcaatctttaagagctctttagtttgagtctttaggtcttgtagtttgagtctttagttctctaagaaatcttgatttatagtgatttatgaacatatgttttatcacttaggctttctagcaatttgtgttttgtcactacttgagcttgtattcagacatatatctctttttcttgctttttaatcttaaagtgtaattaaaacaaatgcacacagaaaacctttcgaatagtactgagaaatataaaataaaaagtgatggt

SEQ ID NO: 92 - DNA, 1508 bp, Homo sapien
tgctttacatgttgcctacttgagtttttttcttttctgtgcatttctcatcattgaaatggttcctgagtagaatctttttaaaataagcttattttaaaaaaattctttgttaattaatatagggatacgaggactctacgatctgtgttcttatgcaagaataaatatgtgcgacctagatgttggaaattaattatctctgaaagggttatcattgtggacacttgcttaatttgtaagatatttgctactcttgattgatttagtctttttctgactttagacaacttgaagtaattgagaatattagttcctttgttggaataacaaaatagaatgccagggaaatgaccttaggcagagataataattttaatttaaccaaagtaatcaaaacaataacaataatcagcaatttcttttattgtttttcactgttttgcatggcacatgttgaatactgaaactctgccttaggttatttgtgcactaacatcaacttcccttttaacgtcttgacatgatgtccaaggtctactgatggccccactggagagcctccttccagggaactgatccctgaagatctacctattaaggaatagcccagtcagagcaacagcgagttggctggtcagcctggtagttggctcagtaggtgaagaggctcttgatgcaaatttggagaatcattaccatcaggtcacagaaggaccccgggcaaggcaatacaagggtctcgatttatgcttatgtgtttgggagacaaaaaggattccaagggaggcttatattgagatacaagatatgactcattgcaattgagtaggcatagagcccaaagaaagctgatttgtagaacagttgactcatagtagacacttagaatatggtcattcacatatttatactatctgtttctcaaaatttgttttaatgatggagtccctattagaaagagacattttgcgtgatgtatagctacctaataccaaagcaatacaaggtttacttttcacctgctcatgtattcaaggatttgccatcattagatatccaaatgagccataaaaaattgtgcaaaatgttattccttaatacataacattttaatttattaaaaaatgagttttacaaatgagtatcaaaagcttagcaccccatcatccctgtcaatgttcacaaaataataaattctaaaatctttaagatgtatatttaattactcatccaagatcagttattgcatgcttaatcagaaaaatacctattaacgtttaacacttagttactttacagattaaaaaacatattatacctgccatctagggagccagcatcctcggtgtatcaaaagtgtttagggcagaaagcagtgatgtgtcatagtgtaccccttttggggtgcctgacttattagacatcttcattgtgtaagcatgatgaagaggctgatgataaggtcttcagttaaagaaacatctacctgagaagtatattttatt

SEQ ID NO: 93 - DNA, 3091 bp, Homo sapien
gagtctcttcagtcttgtccttgcactggggagacattcctgaggaggggtactataggaccagctgaaaggaacatcaacacaactaaaaaaataacagaacatgtcacagaaagttatcacattgactctttagtaataataaataaatgtaatgatactttggggaccatgctaagtctcactagagatgaaatgctgcatcactagaaaaatgctgttgttttacattgttccccttgctaaagaatcagtcagcaatggcattgcctgagtgtgtgtgagacaccactctaatggctctgggagaaaatgctgtgtaagaaaagcttcaggtttatccaacagggaacttactaaaatgggacacatagggaaagaacaaaagaacacatgacattgaggacagattcaaataatcccaaggagtgaaaacaaagtaagatagctgtgggtacataactgcttaggaatgcagggctgaatgaagtcactagaattgttaggtgttgtcaattccttgtatttgtctttgtattcccagcgcatggcacagaacatggtatggaaagaaaaaaagaaaaaaaaaagaaagagggaaagacggaaagatggaaggaaggaatgaaggaaggaagaaggaaaaagaagaacgaaaaagaaaggaaggagagaaagagagaaagaaagaaaagaaagaaaaagagagaggaagggggaaaggagaaaaaccgagaaggatggagggaaggagagaaataaagaagaaggttttcaaagtgtagaagaggtggggggacagattatgcagaaaggaaaagcatatcctggagcatattcaatgacttagaagccagagaaagcaggctcacttaattcaagaagagattacacattctgagtggttttagaaaatggggtagggcaatttccaggtggctttgaacacgttaagatttaatttgggaagtatgatgtgttactgtaactattgtaggcttctgagaggaatattaagatgactcaaatgaatcaagtggaaggaaaaacgtgaaactcaaaggagttaatccaatggaaaaaaacgaaccatactgcaagaaattaaatgaaggcaggcctaaagaatatagtcttaaaatagaaaggcaggtgcttgtcggggtttcttctatgttaatgttaattgagagaaatgggcttagaactcagatcaagaatttgcttctcccactgtgtagcttttttcattcttcagctgttcttcttttctgctactgccccttcctgaaagtgaactccagtccttactgttttagcatcaacgcaaaatatgttagtaaatacagaacgtggaggtggaatcaaatataactttgaaggacgactgttggaacaaatgagctccagatccaccggttctggagttgttcctatgcctccatactttagaataccttcaaaaattcttaaagctgtaaaagaatttagagcccaactaatccaacccatgcattttaaagataagggtatttgagaagagttgttattaatgtttctctttttttataaaagttgttatgaataaaatatacttctcaggtagatgtttctttaactgaagaccttatcatcagcctcttcatcatgcttacacaatgaagatgtctaataagtcaggcaccccaaaaggggtacactatgacacatcactgctttctgccctaaacacttttgatacaccgaggatgctggctccctagatggcaggtataatatgttttttaatctgtaaagtaactaagtgttaaacgttaataggtatttttctgattaagcatgcaataactgatcttggatgagtaattaaatatacatcttaaagattttagaatttattattttgtgaacattgacagggatgatggggtgctaagcttttgatactcatttgtaaaactcattttttaataaattaaaatgttatgtattaaggaataacattttgcacaattttttatggctcatttggatatctaatgatggcaaatccttgaatacatgagcaggtgaaaagtaaaccttgtattgctttggtattaggtagctatacatcacgcaaaatgtctctttctaatagggactccatcattaaaacaaattttgagaaacagatagtataaatatgtgaatgaccatattctaagtgtctactatgagtcaactgttctacaaatcagctttctttgggctctatgcctactcaattgcaatgagtcatatcttgtatctcaatataagcctcccttggaatcctttttgtctcccaaacacataagcataaatcgagacccttgtattgccttgcccggggtccttctgtgacctgatggtaatgattctccaaatttgcatcaagagcctcttcacctactgagccaactaccaggctgaccagccaactcgctgttgctctgactgggctattccttaataggtagatcttcagggatcagttccctggaaggaggctctccagtggggccatcagtagaccttggacatcatgtcaagacgttaaaagggaagttgatgttagtgcacaaataacctaaggcagagtttcagtattcaacatgtgccatgcaaaacagtgaaaaacaataaaagaaattgctgattattgttattgttttgattactttggttaaattaaaattattatctctgcctaaggtcatttccctggcattctattttgttattccaacaaaggaactaatattctcaattacttcaagttgtctaaagtcagaaaaagactaaatcaatcaagagtagcaaatatcttacaaattaagcaagtgtccacaatgataaccctttcagagataattaatttccaacatctaggtcgcacatatttattcttgcataagaacacagatcgtagagtcctcgtatccctatattaattaacaaagaatttttttaaaataagcttattttaaaaagattctactcaggaaccatttcaatgatgagaaatgcacagaaaagaaaaaaactcaagtaggcaacatgtaaagca

SEQ ID NO: 94 - DNA, 1532 bp, Homo sapien
ctcatacatgcatgtgtgcttgaaattcccctaggatgtgaaacagttaggcagagaactgcactgtggtctcccttcctcacttctttccctccctgtttttccttttcgaaaatgtgatacctgatctctaggtcttgcgggctgagaaattttttgtatttgtataatgcagtgtctggccttccccctgacctgctgatgtatttttggcctcattagtagtcagggagatgccttagtgcatccagcactgcaagtcagggatgagacacactacaacaggagagggagcaagcgcgagaggatattagaagagaggcttgtctccaagatatggaaggaagtgagaaatgacagggctgcaagctttgtatgtaggagcccggcagggcgggggagcggcgaggagagccaagtggattctcagaaaaggggggaagccatcgaagagctaaaggtgattagagggggatattgatttcttattctgccagagatttaagcaggcatgcgaggaatctgcaccatggttggcaaaaagagacccgttgcctcctgtaaccagacactcaggctttccaggagcccagggagcaagccgagaagaaagggggcagtgtggtctaggaaaattcaacttgtcgctgatttgtgcctgatgcctgctgtccgtcagcagcctcccttacaatctttttttctctctctcctttttttttccttgccttctccttcttcactgaagcctaggggagccagtaaagattaaatgtgcttctcaaaggcagccacttcatgctgctatgtcgaaagggccattattattattatattttaatggtaaaagagaaaaggagagaggttgagcgagcgagagagaagctaggtgtgatgatgacagactagcttttctgagaggaaaaggaaaagggaagggagagaaaaaggagagcctctgagctcaacggaggattgtgcctgagaagaacccacagaggtgagaaaaaagttgtcttgaaggtgggggtgggggggctgctaaacagacactgtacagagggagaagagacataatttagctgtgttgctagtatgattccatttttaaaggaggggagggggagagtctagagctctaactgtttttagttgcatatggaaatatctaaaaaaatatttagcatttttactaagtgcgttgaggcctctccagtgtcctcctggctgtggctgctttgtcattctctttgactagccagccatctaccttgctcaggcctggaataaaagaagaacaagaagaagaaagaaatgaaatgaaaaacagaaagaaaaaggagaagaaacatttgtaaaagggtcatcttcccatctgcctcccctccttttcctttcatttttggtggcggcacaggaaagccccacttccagtctgatgaggaaagcgacaatctatcaggtacagaaccaggggctgtctgcgaagatggaggggaattatgcttcggattcctctgaaatattggcca

SEQ ID NO: 95 - DNA, 1107 bp, Homo sapien
ctcatacatgcatgtgtgcttgaaattcccctaggatgtgaaacagttaggcagagaactgcactgtggtctcccttcctcacttctttccctccctgtttttccttttcgaaaatgtgatacctgatctctaggtcttgcgggctgagaaattttttgtatttgtataatgcagtgtctggccttccccctgacctgctgatgtatttttggcctcattagtagtcagggagatgccttagtgcatccagcactgcaagtcagggatgagacacactacaacaggagagggagcaagcgcgagaggatattagaagagaggcttgtctccaagatatggaaggaagtgagaaatgacagggctgcaagctttgtatgtaggagcccggcagggcgggggagcggcgaggagagccaagtggattctcagaaaaggggggaagccatcgaagagctaaaggtgattagagggggatattgatttcttattctgccagagatttaagcaggcatgcgaggaatctgcaccatggttggcaaaaagagacccgttgcctcctgtaaccagacactcaggctttccaggagcccagggagcaagccgagaagaaagggggcagtgtggtctaggaaaattcaacttgtcgctgatttgtgcctgatgcctgctgtccgtcagcagcctcccttacaatctttttttctctctctcctttttttttccttgccttctccttcttcactgaagcctaggggagccagtaaagattaaatgtgcttctcaaaggcagccacttcatgctgctatgtcgaaagggccattattattattatattttaatggtaaaagagaaaaggagagaggttgagcgagcgagagagaagctaggtgtgatgatgacagactagcttttctgagaggaaaaggaaaagggaagggagagaaaaaggagagcctctgagctcaacggaggattgtgcctgagaagaacccacagagagtgcaggaaattctaccccccaagtatggcaccttggcatgctgagtattttaagctgaaggaaacagagaaaaccacagaagcagaaaggtctttctgacctctc

SEQ ID NO: 96 - DNA, 856 bp, Homo sapien
  misc_feature (516)..(516): n=a, c, g or t
gttcattgttcattggtcctttaagagagagctttagcttttacttgagggttgtaagcacattagaggaataattccctttggatactatacagaaggagccacctgcaaaatgttgatgctgttattgaagtctcaagtggaatcagctttcaaaaaattagatattagatacatccgatataatttgcaatgtgtaattatactaatgtgcatatagttgtctgttgctttacatgttgcctacttgagtttttttcttttcttgtgcatttctcatcattgaaatggttcctgagtagaatctttttaaaataagcttattttaaaaaaattctttgttaattaatatagggatacgaggactctacgatctgtgttcttatgcaagaataaatatgtgcgacctagatgttggaaattaattatctctgaaagggttatcattgtggacacttgcttaatttgtaaaatatttgctactcttgattgatttagtctttttttcttgacttnttagaaccaactttgaaggtacatttgaggaaataattacgtttccctatatggatgtgaattaacccaaaaatatgtaattgccccgtgggaaaaatgtaaccctttaaggccagcaggaattaataaattttttaacattttaaaccccaaagggttaaattcacaaaactcattttaacccattaaatttcaagcccaatttaccttttttaaaatgggtttttttcacacttggttattgggcaattgggcaacacatgggtttggaaattacttggaaaacttttctgggccctttaaggggtttttggtggcacactttcccttcctttttcct

SEQ ID NO: 97 - DNA, 501 bp, Homo sapien
cgtgactatagagtaaggcagaatgagacaagtagatataagaaatggcagggcagggtcaaatcacatcaggatgggaacaaaaaaacaggagatttcagaaaggctaatgaatgaacgaatggaagtcagtgggcaatttcaatttcaatatgctgcgtatgacgtgagtaaggaaccaagtgcacactgctattgagatgggccttaacaactggataccattttgttgacagctctgatgtagatgggatggaattccaagtgctgggaatacttctagcagctaaagttaagagcgtaccagatgtgttcagagaaccttgagttgatctgaaaagagaatctgctcaaggagaaaacaatgtaagcgaaaatgaaaatagtaacaacaaaaaaacaaaatagcatcataatcttgtcataaaaaaatcagagttagggacagagatgagagagagaagagaagagagaaggaagccatttttaaaacccctcatg

SEQ ID NO: 98 - DNA, 587 bp, Homo sapien
tgagtcactctcaaacttcacagcattccacgacagctcatccttcttgactttcctttttttttcccttttcctttttccttttttaagttctcttaatattttttattcccaacagacttgtctttggacaaaattgagaagaactcataaacttggcttcctcgcttctgctcctcagacccctgcaaacatgacttaccttggaaactataagaaaggatggccttatgtgaggacactcatcatcctggcgttaatgtgcttctcttctatttggcatttgagtccaacactacctgatctcagtccttctttttagaatcaatatttccatagcaagtgtagcatcatcttaaatggggaatcccactttttttttttaaagctagagatggcagtttggtgggattggccaaaaataatttgaagaaagaatgcactaagggtgaaaatgttatgtttataaaaatattatgaaagctaaatgtgatgcacttgaaaaatgtggcaggatatttcactgtatattcatgaaatctgtatctaaactatatcaataaatactattcaagagaatataaaaa

SEQ ID NO: 99 - DNA, 281 bp, Homo sapien
gagtagcattgctggatgtgcctcttttgttgaggtgattggatctttgggcaaaaaccagtgactgcaaaggatgagagaaacgatcagaaaaactgaaaagctgtaggagaccaaacactagtgtctcccctgcttcaggggacacccactgtcagagtgaacgacaaaggttagatttgaacaagcttgcttgcttgctttctttctttctttctttttctttctttctttctttctttctttctttctttctttctttctttctgtttctctttctt

SEQ ID NO: 100 - DNA, 404 bp, Homo sapien
ccaactgcccttttttctctcgtcaaagcataagctacagagttacagtctcgagatttggtgtatcgcttcctgcccccgcctcccctccccgcccccgttctccgtcctctattgaaacacctcgcccagcctagcgcactgagagctctcattttccccccttgctcgggatggtgccacaggaggctgtgcgggccccgctccgcttcgaatgggtgagttcagaacgctattcgtctttacacttctatagcctccgaatcctacttcttggtcttctcctttgaaaacccgatttctatgatttttgcatgcggcatacttgccctgggggaaagagatgcctcctattttctcttcagtcatttgtgctagtcgtaaattaaagctttgaaaagaca

SEQ ID NO: 101 - DNA, 5884 bp, Homo sapien
gttcattgttcattggtcctttaagagagagctttagcttttacttgagggttgtaagcacattagaggaataattccctttggatactatacagaaggagccacctgcaaaatgttgatgctgttattgaagtctcaagtggaatcagctttcaaaaaattagatattagatacatccgatataatttgcaatgtgtaattatactaatgtgcatatagttgtctgttgctttacatgttgcctacttgagtttttttcttttcttgtgcatttctcatcattgaaatggttcctgagtagaatctttttaaaataagcttattttaaaaaaattctttgttaattaatatagggatacgaggactctacgatctgtgttcttatgcaagaataaatatgtgcgacctagatgttggaaattaattatctctgaaagggttatcattgtggacacttgcttaatttgtaaaatatttgctactcttgattgatttagtctttttctgactttagacaacttgaagtaattgagaatattagttcctttgttggaataacaaaatagaatgccagggaaatgaccttaggcagagataataattttaatttaaccaaagtaatcaaaacaataacaataatcagcaatttcttttattgtttttcactgttttgcatggcacatgttgaatactgaaactctgccttaggttatttgtgcactaacatcaacttcccttttaacgtcttgacatgatgtccaaggtctactgatggccccactggagagcctccttccagggaactgatccctgaagatctacctattaaggaatagcccagtcagagcaacagcgagttggctggtcagcctggtagttggctcagtaggtgaagaggctcttgatgcaaatttggagaatcattaccatcaggtcacagaaggaccccgggcaaggcaatacaagggtctcgatttatgcttatgtgtttgggagacaaaaaggattccaagggaggcttatattgagatacaagatatgactcattgcaattgagtaggcatagagcccaaagaaagctgatttgtagaacagttgactcatagtagacacttagaatatggtcattcacatatttatactatctgtttctcaaaatttgttttaatgatggagtccctattagaaagagacattttgcgtgatgtatagctacctaataccaaagcaatacaaggtttacttttcacctgctcatgtattcaaggatttgccatcattagatatccaaatgagccataaaaaattgtgcaaaatgttattccttaatacataacattttaatttattaaaaaatgagttttacaaatgagtatcaaaagcttagcaccccatcatccctgtcaatgttcacaaaataataaattctaaaatctttaagatgtatatttaattactcatccaagatcagttattgcatgcttaatcagaaaaatacctattaacgtttaacacttagttactttacagattaaaaaacatattatacctgccatctagggagccagcatcctcggtgtatcaaaagtgtttagggcagaaagcagtgatgtgtcatagtgtaccccttttggtgtgcctgacttattagacatcttcattgtgtaagcatgatgaagaggctgatgataaggtcttcagttaaagaaacatctacctgagaagtatattttattcataacaacttttataaaaaaagagaaacattaataacaactcttctcaaatacccttatctttaaaatgcatgggttggattagttgggctctaaattcttttacagctttaagaatttttgaaggtattctaaagtatggaggcataggaacaactccagaaccggtggatctggagctcatttgttccaacagtcgtccttcaaagttatatttgattccacctccacgttctgtatttactaacatattttgcgttgatgctaaaacagtaaggactggagttcactttcaggaaggggcagtagcagaaaagaagaacagctgaagaatgaaaaaagctacacagtgggagaagcaaattcttgatctgagttctaagcccatttctctcaattaacattaacatagaagaaaccccgacaagcacctgcctttctattttaagactatattctttaggcctgccttcatttaatttcttgcagtatggttcgtttttttccattggattaactcctttgagtttcacgtttttccttccacttgattcatttgagtcatcttaatattcctctcagaagcctacaatagttacagtaacacatcatacttcccaaattaaatcttaacgtgttcaaagccacctggaaattgccctaccccattttctaaaaccactcagaatgtgtaatctcttcttgaattaagtgagcctgctttctctggcttctaagtcattgaatatgctccaggatatgcttttcctttctgcataatctgtccccccacctcttctacactttgaaaaccttcttctttatttctctccttccctccatccttctcggtttttctcctttcccccttcctctctctttttctttcttttctttctttctctctttctttccttcctttctttttcgttcttctttttccttcttccttccttcattccttccttccatctttccgtctttccctctttcttttttttttctttttttctttccataccatgttctgtgccatgcgctgggaatacaaagacaaatacaaggaattgacaacacctaacaattctagtgacttcattcagccctgcattcctaagcagttatgtacccacagctatcttactttgttttcactccttggatttatttgaatctgtcctcaatgtcatgtgttcttttgttctttccctatgtgtcccattttagtaagttccctgttggataaacctgaagcttttcttacacagcattttctcccagagccattagagtggtgtctcacacacactcaggcaatgccattgctgactgattctttagcaaggggaacaatgtaaaacaacagcatttttctagtgatgcagcatttcatctctagtgagacttagcatggtccccaaagtatcattacatttatttattattactaaagagtcaatgtgataactttctgtgacatgttctgttatttttttagttgtgttgatgttcctttcagctggtcctatagtacccctcctcaggaatgtctccccagtgcaaggacaaagactgaagagactgctatattgatggactctcaagccaactatgaagttgaaacaaagaaagtgatcacctgaagacacctcctctgctaagaaacacccccaaattgtgcagcttctgccactagaactctcagaacaagagacaatcttttcaagaaacagaaaaactcaataatgacatctagattttcatgagccaagaactttcccttcctcatgtgtattcctctgtttgtacttaaattcatgtgacattcatttttttcctagtatggatatgcttattaatgcacttgtttcaaaatcccaaattgcacaaatgtgttaatattttaagaaacaaaatgaatcctacaaggagaatgatttttagccacacatagggttggatcttgagagtgacctacagaataaaagtacttttaaaataaagtagtcagaggctattcaaagggtaaaataatcatagtaccacattggtccacttgacactaaccaatcgatcatttttttttaatcaagaaagctagattctatcagataaaatcactgcttctaaagagtttaaatctagttagaaaaagttatagaaatgtttgcaaagataagtaacagatagagtcagtagaggataagatcaaaaacaaaaccaagcaaaagatgagttcaggggagtttgccatcaagttggcaaaactgacttacttagggaagaaagttataaaacaggaaaatatgagatgaaccttgagtgatgtggaagatttagataaatggaaaggaaggagaaaatggagttctttaggtggttgtaattggaggaggaaatgaatacacacatcttgttgacttaaacccagacattcagcagctctctatacatatctggaaaagactgcacagtcacctcctgtctctcaccccaggtattacttagaattattatcatatttcccttcctttaaagtaagtaagggtgattggtgacaatatggagaactatgatttttccattaacctaataataattggtatttattgagttctgttaagcattttacatattaactcacttaagcctttcaacagccttgcaaaataggtattattatccccattttacaggcaagaaaactgaggtttaagtaacttgccgaagtgccatatacagggctcacattcagtattgcagttgcaaagctcatgatctatagtgccaagttgcaatattgtagtcaatgtcacaattattacccctttttatattccttgatatttttccatggcaaacaattagctatttcatttaataatcacctaaaacttttcagtcttctgattaaaattacgctggagtgatagaatgtattttcatgatagaaattgggaaaaaaaatggggaatgaagtttatcagcatttcagacttgtttttttttttttttttttgcaagactttgatgagattgttcacttttgtctatgtaaaatcccaaatccttgagaataaaaaagggggaggtttaagtcacttgttgcaatgccctttttaatagaggcaataaatctaaaggccataaatttagagtgacttacagaagatcgaactttggagtgtggcagagtaagggatggaaaccgggccctccagttcactatcagtagcttttgcactggtctgcccttcctaaattaagtatgcacttcaatttgatgagtggaaacagtctatctgggcagtaaccagggagctttgtgcctagtagattgcttctgttctgcacttctttggtttcccacctcaatgtaaaaaatagctagcaatgaagtccagaagttgtcaatggttcatccccagaagaatgcataatgtccaaagttgtatgtgtatgatgtcttcaatggtattaagttatttcaaattcttagttcacctacataaatcatttctaacaagcatcttcttaaccaactttatgcacagtgtatgtttgtaagtgcttctgcacgaatgtttatacatgactgtttccatagtacttatgtttttaaaaatattcagtcatttcctactataatcctcatgtatccatgtaactgactcaaaaatacttcagccacagaaagctaaaactgagcaaatctcattcttcttttccatcccctttgcatgtggctggcatttagtaatgattaataatatggccagctgaataacagaggtttgagacacaattctttctcaaaggagtcagctaagctgggtctacttatggacaaacatctaaatgtgtggaagtatctgatatttgacaatggtaaatttccacttagctagctagcattgtcagacttcaatctcctcatggctctggccgtcctgttttaagcatgataattgttggccacatctcacatagttctcattgagtgagttcataaataaacagggtttttttttttttttaaagagcagccaagcacaaagtgtgactttgttgacattttatgtgactttgtcatatgttcctaacccccaataaaagcaatgttgcatcaactgtgaaaaaaaaatga

SEQ ID NO: 102 - DNA, 3682 bp, Homo sapien
ctcatacatgcatgtgtgcttgaaattcccctaggatgtgaaacagttaggcagagaactgcactgtggtctcccttcctcacttctttccctccctgtttttccttttcgaaaatgtgatacctgatctctaggtcttgcgggctgagaaattttttgtatttgtataatgcagtgtctggccttccccctgacctgctgatgtatttttggcctcattagtagtcagggagatgccttagtgcatccagcactgcaagtcagggatgagacacactacaacaggagagggagcaagcgcgagaggatattagaagagaggcttgtctccaagatatggaaggaagtgagaaatgacagggctgcaagctttgtatgtaggagcccggcagggcgggggagcggcgaggagagccaagtggattctcagaaaaggggggaagccatcgaagagctaaaggtgattagagggggatattgatttcttattctgccagagatttaagcaggcatgcgaggaatctgcaccatggttggcaaaaagagacccgttgcctcctgtaaccagacactcaggctttccaggagcccagggagcaagccgagaagaaagggggcagtgtggtctaggaaaattcaacttgtcgctgatttgtgcctgatgcctgctgtccgtcagcagcctcccttacaatctttttttctctctctcctttttttttccttgccttctccttcttcactgaagcctaggggagccagtaaagattaaatgtgcttctcaaaggcagccacttcatgctgctatgtcgaaagggccattattattattatattttaatggtaaaagagaaaaggagagaggttgagcgagcgagagagaagctaggtgtgatgatgacagactagcttttctgagaggaaaaggaaaagggaagggagagaaaaaggagagcctctgagctcaacggaggattgtgcctgagaagaacccacagaggaggctgtgcgggccccgctccgcttcgaatggttgtgttgatgttcctttcagctggtcctatagtacccctcctcaggaatgtctccccagtgcaaggacaaagactgaagagactgctatattgatggactctcaagccaactatgaagttgaaacaaagaaagtgatcacctgaagacacctcctctgctaagaaacacccccaaattgtgcagcttctgccactagaactctcagaacaagagacaatcttttcaagaaacagaaaaactcaataatgacatctagattttcatgagccaagaactttcccttcctcatgtgtattcctctgtttgtacttaaattcatgtgacattcatttttttcctagtatggatatgcttattaatgcacttgtttcaaaatcccaaattgcacaaatgtgttaatattttaagaaacaaaatgaatcctacaaggagaatgatttttagccacacatagggttggatcttgagagtgacctacagaataaaagtacttttaaaataaagtagtcagaggctattcaaagggtaaaataatcatagtaccacattggtccacttgacactaaccaatcgatcatttttttttaatcaagaaagctagattctatcagataaaatcactgcttctaaagagtttaaatctagttagaaaaagttatagaaatgtttgcaaagataagtaacagatagagtcagtagaggataagatcaaaaacaaaaccaagcaaaagatgagttcaggggagtttgccatcaagttggcaaaactgacttacttagggaagaaagttataaaacaggaaaatatgagatgaaccttgagtgatgtggaagatttagataaatggaaaggaaggagaaaatggagttctttaggtggttgtaattggaggaggaaatgaatacacacatcttgttgacttaaacccagacattcagcagctctctatacatatctggaaaagactgcacagtcacctcctgtctctcaccccaggtattacttagaattattatcatatttcccttcctttaaagtaagtaagggtgattggtgacaatatggagaactatgatttttccattaacctaataataattggtatttattgagttctgttaagcattttacatattaactcacttaagcctttcaacagccttgcaaaataggtattattatccccattttacaggcaagaaaactgaggtttaagtaacttgccgaagtgccatatacagggctcacattcagtattgcagttgcaaagctcatgatctatagtgccaagttgcaatattgtagtcaatgtcacaattattacccctttttatattccttgatatttttccatggcaaacaattagctatttcatttaataatcacctaaaacttttcagtcttctgattaaaattacgctggagtgatagaatgtattttcatgatagaaattgggaaaaaaaatggggaatgaagtttatcagcatttcagacttgtttttttttttttttttttgcaagactttgatgagattgttcacttttgtctatgtaaaatcccaaatccttgagaataaaaaagggggaggtttaagtcacttgttgcaatgccctttttaatagaggcaataaatctaaaggccataaatttagagtgacttacagaagatcgaactttggagtgtggcagagtaagggatggaaaccgggccctccagttcactatcagtagcttttgcactggtctgcccttcctaaattaagtatgcacttcaatttgatgagtggaaacagtctatctgggcagtaaccagggagctttgtgcctagtagattgcttctgttctgcacttctttggtttcccacctcaatgtaaaaaatagctagcaatgaagtccagaagttgtcaatggttcatccccagaagaatgcataatgtccaaagttgtatgtgtatgatgtcttcaatggtattaagttatttcaaattcttagttcacctacataaatcatttctaacaagcatcttcttaaccaactttatgcacagtgtatgtttgtaagtgcttctgcacgaatgtttatacatgactgtttccatagtacttatgtttttaaaaatattcagtcatttcctactataatcctcatgtatccatgtaactgactcaaaaatacttcagccacagaaagctaaaactgagcaaatctcattcttcttttccatcccctttgcatgtggctggcatttagtaatgattaataatatggccagctgaataacagaggtttgagacacaattctttctcaaaggagtcagctaagctgggtctacttatggacaaacatctaaatgtgtggaagtatctgatatttgacaatggtaaatttccacttagctagctagcattgtcagacttcaatctcctcatggctctggccgtcctgttttaagcatgataattgttggccacatctcacatagttctcattgagtgagttcataaataaacagggtttttttttttttttaaagagcagccaagcacaaagtgtgactttgttgacattttatgtgactttgtcatatgttcctaacccccaataaaagcaatgttgcatcaactgtgaaaaaaaaatga

SEQ ID NO: 103 - DNA, 2867 bp, Homo sapien
ccaactgcccttttttctctcgtcaaagcataagctacagagttacagtctcgagatttggtgtatcgcttcctgcccccgcctcccctccccgcccccgttctccgtcctctattgaaacacctcgcccagcctagcgcactgagagctctcattttccccccttgctcgggatggtgccacaggaggctgtgcgggccccgctccgcttcgaatggttgtgttgatgttcctttcagctggtcctatagtacccctcctcaggaatgtctccccagtgcaaggacaaagactgaagagactgctatattgatggactctcaagccaactatgaagttgaaacaaagaaagtgatcacctgaagacacctcctctgctaagaaacacccccaaattgtgcagcttctgccactagaactctcagaacaagagacaatcttttcaagaaacagaaaaactcaataatgacatctagattttcatgagccaagaactttcccttcctcatgtgtattcctctgtttgtacttaaattcatgtgacattcatttttttcctagtatggatatgcttattaatgcacttgtttcaaaatcccaaattgcacaaatgtgttaatattttaagaaacaaaatgaatcctacaaggagaatgatttttagccacacatagggttggatcttgagagtgacctacagaataaaagtacttttaaaataaagtagtcagaggctattcaaagggtaaaataatcatagtaccacattggtccacttgacactaaccaatcgatcatttttttttaatcaagaaagctagattctatcagataaaatcactgcttctaaagagtttaaatctagttagaaaaagttatagaaatgtttgcaaagataagtaacagatagagtcagtagaggataagatcaaaaacaaaaccaagcaaaagatgagttcaggggagtttgccatcaagttggcaaaactgacttacttagggaagaaagttataaaacaggaaaatatgagatgaaccttgagtgatgtggaagatttagataaatggaaaggaaggagaaaatggagttctttaggtggttgtaattggaggaggaaatgaatacacacatcttgttgacttaaacccagacattcagcagctctctatacatatctggaaaagactgcacagtcacctcctgtctctcaccccaggtattacttagaattattatcatatttcccttcctttaaagtaagtaagggtgattggtgacaatatggagaactatgatttttccattaacctaataataattggtatttattgagttctgttaagcattttacatattaactcacttaagcctttcaacagccttgcaaaataggtattattatccccattttacaggcaagaaaactgaggtttaagtaacttgccgaagtgccatatacagggctcacattcagtattgcagttgcaaagctcatgatctatagtgccaagttgcaatattgtagtcaatgtcacaattattacccctttttatattccttgatatttttccatggcaaacaattagctatttcatttaataatcacctaaaacttttcagtcttctgattaaaattacgctggagtgatagaatgtattttcatgatagaaattgggaaaaaaaatggggaatgaagtttatcagcatttcagacttgtttttttttttttttttttgcaagactttgatgagattgttcacttttgtctatgtaaaatcccaaatccttgagaataaaaaagggggaggtttaagtcacttgttgcaatgccctttttaatagaggcaataaatctaaaggccataaatttagagtgacttacagaagatcgaactttggagtgtggcagagtaagggatggaaaccgggccctccagttcactatcagtagcttttgcactggtctgcccttcctaaattaagtatgcacttcaatttgatgagtggaaacagtctatctgggcagtaaccagggagctttgtgcctagtagattgcttctgttctgcacttctttggtttcccacctcaatgtaaaaaatagctagcaatgaagtccagaagttgtcaatggttcatccccagaagaatgcataatgtccaaagttgtatgtgtatgatgtcttcaatggtattaagttatttcaaattcttagttcacctacataaatcatttctaacaagcatcttcttaaccaactttatgcacagtgtatgtttgtaagtgcttctgcacgaatgtttatacatgactgtttccatagtacttatgtttttaaaaatattcagtcatttcctactataatcctcatgtatccatgtaactgactcaaaaatacttcagccacagaaagctaaaactgagcaaatctcattcttcttttccatcccctttgcatgtggctggcatttagtaatgattaataatatggccagctgaataacagaggtttgagacacaattctttctcaaaggagtcagctaagctgggtctacttatggacaaacatctaaatgtgtggaagtatctgatatttgacaatggtaaatttccacttagctagctagcattgtcagacttcaatctcctcatggctctggccgtcctgttttaagcatgataattgttggccacatctcacatagttctcattgagtgagttcataaataaacagggtttttttttttttttaaagagcagccaagcacaaagtgtgactttgttgacattttatgtgactttgtcatatgttcctaacccccaataaaagcaatgttgcatcaactgtgaaaaaaaaatga

SEQ ID NO: 104 - DNA, 3649 bp, Homo sapien
ctcatacatgcatgtgtgcttgaaattcccctaggatgtgaaacagttaggcagagaactgcactgtggtctcccttcctcacttctttccctccctgtttttccttttcgaaaatgtgatacctgatctctaggtcttgcgggctgagaaattttttgtatttgtataatgcagtgtctggccttccccctgacctgctgatgtatttttggcctcattagtagtcagggagatgccttagtgcatccagcactgcaagtcagggatgagacacactacaacaggagagggagcaagcgcgagaggatattagaagagaggcttgtctccaagatatggaaggaagtgagaaatgacagggctgcaagctttgtatgtaggagcccggcagggcgggggagcggcgaggagagccaagtggattctcagaaaaggggggaagccatcgaagagctaaaggtgattagagggggatattgatttcttattctgccagagatttaagcaggcatgcgaggaatctgcaccatggttggcaaaaagagacccgttgcctcctgtaaccagacactcaggctttccaggagcccagggagcaagccgagaagaaagggggcagtgtggtctaggaaaattcaacttgtcgctgatttgtgcctgatgcctgctgtccgtcagcagcctcccttacaatctttttttctctctctcctttttttttccttgccttctccttcttcactgaagcctaggggagccagtaaagattaaatgtgcttctcaaaggcagccacttcatgctgctatgtcgaaagggccattattattattatattttaatggtaaaagagaaaaggagagaggttgagcgagcgagagagaagctaggtgtgatgatgacagactagcttttctgagaggaaaaggaaaagggaagggagagaaaaaggagagcctctgagctcaacggaggattgtgcctgagaagaacccacagagttgtgttgatgttcctttcagctggtcctatagtacccctcctcaggaatgtctccccagtgcaaggacaaagactgaagagactgctatattgatggactctcaagccaactatgaagttgaaacaaagaaagtgatcacctgaagacacctcctctgctaagaaacacccccaaattgtgcagcttctgccactagaactctcagaacaagagacaatcttttcaagaaacagaaaaactcaataatgacatctagattttcatgagccaagaactttcccttcctcatgtgtattcctctgtttgtacttaaattcatgtgacattcatttttttcctagtatggatatgcttattaatgcacttgtttcaaaatcccaaattgcacaaatgtgttaatattttaagaaacaaaatgaatcctacaaggagaatgatttttagccacacatagggttggatcttgagagtgacctacagaataaaagtacttttaaaataaagtagtcagaggctattcaaagggtaaaataatcatagtaccacattggtccacttgacactaaccaatcgatcatttttttttaatcaagaaagctagattctatcagataaaatcactgcttctaaagagtttaaatctagttagaaaaagttatagaaatgtttgcaaagataagtaacagatagagtcagtagaggataagatcaaaaacaaaaccaagcaaaagatgagttcaggggagtttgccatcaagttggcaaaactgacttacttagggaagaaagttataaaacaggaaaatatgagatgaaccttgagtgatgtggaagatttagataaatggaaaggaaggagaaaatggagttctttaggtggttgtaattggaggaggaaatgaatacacacatcttgttgacttaaacccagacattcagcagctctctatacatatctggaaaagactgcacagtcacctcctgtctctcaccccaggtattacttagaattattatcatatttcccttcctttaaagtaagtaagggtgattggtgacaatatggagaactatgatttttccattaacctaataataattggtatttattgagttctgttaagcattttacatattaactcacttaagcctttcaacagccttgcaaaataggtattattatccccattttacaggcaagaaaactgaggtttaagtaacttgccgaagtgccatatacagggctcacattcagtattgcagttgcaaagctcatgatctatagtgccaagttgcaatattgtagtcaatgtcacaattattacccctttttatattccttgatatttttccatggcaaacaattagctatttcatttaataatcacctaaaacttttcagtcttctgattaaaattacgctggagtgatagaatgtattttcatgatagaaattgggaaaaaaaatggggaatgaagtttatcagcatttcagacttgtttttttttttttttttttgcaagactttgatgagattgttcacttttgtctatgtaaaatcccaaatccttgagaataaaaaagggggaggtttaagtcacttgttgcaatgccctttttaatagaggcaataaatctaaaggccataaatttagagtgacttacagaagatcgaactttggagtgtggcagagtaagggatggaaaccgggccctccagttcactatcagtagcttttgcactggtctgcccttcctaaattaagtatgcacttcaatttgatgagtggaaacagtctatctgggcagtaaccagggagctttgtgcctagtagattgcttctgttctgcacttctttggtttcccacctcaatgtaaaaaatagctagcaatgaagtccagaagttgtcaatggttcatccccagaagaatgcataatgtccaaagttgtatgtgtatgatgtcttcaatggtattaagttatttcaaattcttagttcacctacataaatcatttctaacaagcatcttcttaaccaactttatgcacagtgtatgtttgtaagtgcttctgcacgaatgtttatacatgactgtttccatagtacttatgtttttaaaaatattcagtcatttcctactataatcctcatgtatccatgtaactgactcaaaaatacttcagccacagaaagctaaaactgagcaaatctcattcttcttttccatcccctttgcatgtggctggcatttagtaatgattaataatatggccagctgaataacagaggtttgagacacaattctttctcaaaggagtcagctaagctgggtctacttatggacaaacatctaaatgtgtggaagtatctgatatttgacaatggtaaatttccacttagctagctagcattgtcagacttcaatctcctcatggctctggccgtcctgttttaagcatgataattgttggccacatctcacatagttctcattgagtgagttcataaataaacagggtttttttttttttttaaagagcagccaagcacaaagtgtgactttgttgacattttatgtgactttgtcatatgttcctaacccccaataaaagcaatgttgcatcaactgtgaaaaaaaaatga

SEQ ID NO: 105 - DNA, 3628 bp, Homo sapien
ctcatacatgcatgtgtgcttgaaattcccctaggatgtgaaacagttaggcagagaactgcactgtggtctcccttcctcacttctttccctccctgtttttccttttcgaaaatgtgatacctgatctctaggtcttgcgggctgagaaattttttgtatttgtataatgcagtgtctggccttccccctgacctgctgatgtatttttggcctcattagtagtcagggagatgccttagtgcatccagcactgcaagtcagggatgagacacactacaacaggagagggagcaagcgcgagaggatattagaagagaggcttgtctccaagatatggaaggaagtgagaaatgacagggctgcaagctttgtatgtaggagcccggcagggcgggggagcggcgaggagagccaagtggattctcagaaaaggggggaagccatcgaagagctaaaggtgattagagggggatattgatttcttattctgccagagatttaagcaggcatgcgaggaatctgcaccatggttggcaaaaagagacccgttgcctcctgtaaccagacactcaggctttccaggagcccagggagcaagccgagaagaaagggggcagtgtggtctaggaaaattcaacttgtcgctgatttgtgcctgatgcctgctgtccgtcagcagcctcccttacaatctttttttctctctctcctttttttttccttgccttctccttcttcactgaagcctaggggagccagtaaagattaaatgtgcttctcaaaggcagccacttcatgctgctatgtcgaaagggccattattattattatattttaatggtaaaagagaaaaggagagaggttgagcgagcgagagagaagctaggtgtgatgatgacagactagcttttctgagaggaaaaggaaaagggaagggagagaaaaaggagagcctctgagctcaacggaggattgtgcctgagaagaacccacagagctggtcctatagtacccctcctcaggaatgtctccccagtgcaaggacaaagactgaagagactgctatattgatggactctcaagccaactatgaagttgaaacaaagaaagtgatcacctgaagacacctcctctgctaagaaacacccccaaattgtgcagcttctgccactagaactctcagaacaagagacaatcttttcaagaaacagaaaaactcaataatgacatctagattttcatgagccaagaactttcccttcctcatgtgtattcctctgtttgtacttaaattcatgtgacattcatttttttcctagtatggatatgcttattaatgcacttgtttcaaaatcccaaattgcacaaatgtgttaatattttaagaaacaaaatgaatcctacaaggagaatgatttttagccacacatagggttggatcttgagagtgacctacagaataaaagtacttttaaaataaagtagtcagaggctattcaaagggtaaaataatcatagtaccacattggtccacttgacactaaccaatcgatcatttttttttaatcaagaaagctagattctatcagataaaatcactgcttctaaagagtttaaatctagttagaaaaagttatagaaatgtttgcaaagataagtaacagatagagtcagtagaggataagatcaaaaacaaaaccaagcaaaagatgagttcaggggagtttgccatcaagttggcaaaactgacttacttagggaagaaagttataaaacaggaaaatatgagatgaaccttgagtgatgtggaagatttagataaatggaaaggaaggagaaaatggagttctttaggtggttgtaattggaggaggaaatgaatacacacatcttgttgacttaaacccagacattcagcagctctctatacatatctggaaaagactgcacagtcacctcctgtctctcaccccaggtattacttagaattattatcatatttcccttcctttaaagtaagtaagggtgattggtgacaatatggagaactatgatttttccattaacctaataataattggtatttattgagttctgttaagcattttacatattaactcacttaagcctttcaacagccttgcaaaataggtattattatccccattttacaggcaagaaaactgaggtttaagtaacttgccgaagtgccatatacagggctcacattcagtattgcagttgcaaagctcatgatctatagtgccaagttgcaatattgtagtcaatgtcacaattattacccctttttatattccttgatatttttccatggcaaacaattagctatttcatttaataatcacctaaaacttttcagtcttctgattaaaattacgctggagtgatagaatgtattttcatgatagaaattgggaaaaaaaatggggaatgaagtttatcagcatttcagacttgtttttttttttttttttttgcaagactttgatgagattgttcacttttgtctatgtaaaatcccaaatccttgagaataaaaaagggggaggtttaagtcacttgttgcaatgccctttttaatagaggcaataaatctaaaggccataaatttagagtgacttacagaagatcgaactttggagtgtggcagagtaagggatggaaaccgggccctccagttcactatcagtagcttttgcactggtctgcccttcctaaattaagtatgcacttcaatttgatgagtggaaacagtctatctgggcagtaaccagggagctttgtgcctagtagattgcttctgttctgcacttctttggtttcccacctcaatgtaaaaaatagctagcaatgaagtccagaagttgtcaatggttcatccccagaagaatgcataatgtccaaagttgtatgtgtatgatgtcttcaatggtattaagttatttcaaattcttagttcacctacataaatcatttctaacaagcatcttcttaaccaactttatgcacagtgtatgtttgtaagtgcttctgcacgaatgtttatacatgactgtttccatagtacttatgtttttaaaaatattcagtcatttcctactataatcctcatgtatccatgtaactgactcaaaaatacttcagccacagaaagctaaaactgagcaaatctcattcttcttttccatcccctttgcatgtggctggcatttagtaatgattaataatatggccagctgaataacagaggtttgagacacaattctttctcaaaggagtcagctaagctgggtctacttatggacaaacatctaaatgtgtggaagtatctgatatttgacaatggtaaatttccacttagctagctagcattgtcagacttcaatctcctcatggctctggccgtcctgttttaagcatgataattgttggccacatctcacatagttctcattgagtgagttcataaataaacagggtttttttttttttttaaagagcagccaagcacaaagtgtgactttgttgacattttatgtgactttgtcatatgttcctaacccccaataaaagcaatgttgcatcaactgtgaaaaaaaaatga

SEQ ID NO: 106 - DNA, 2846 bp, Homo sapien
ccaactgcccttttttctctcgtcaaagcataagctacagagttacagtctcgagatttggtgtatcgcttcctgcccccgcctcccctccccgcccccgttctccgtcctctattgaaacacctcgcccagcctagcgcactgagagctctcattttccccccttgctcgggatggtgccacaggaggctgtgcgggccccgctccgcttcgaatggctggtcctatagtacccctcctcaggaatgtctccccagtgcaaggacaaagactgaagagactgctatattgatggactctcaagccaactatgaagttgaaacaaagaaagtgatcacctgaagacacctcctctgctaagaaacacccccaaattgtgcagcttctgccactagaactctcagaacaagagacaatcttttcaagaaacagaaaaactcaataatgacatctagattttcatgagccaagaactttcccttcctcatgtgtattcctctgtttgtacttaaattcatgtgacattcatttttttcctagtatggatatgcttattaatgcacttgtttcaaaatcccaaattgcacaaatgtgttaatattttaagaaacaaaatgaatcctacaaggagaatgatttttagccacacatagggttggatcttgagagtgacctacagaataaaagtacttttaaaataaagtagtcagaggctattcaaagggtaaaataatcatagtaccacattggtccacttgacactaaccaatcgatcatttttttttaatcaagaaagctagattctatcagataaaatcactgcttctaaagagtttaaatctagttagaaaaagttatagaaatgtttgcaaagataagtaacagatagagtcagtagaggataagatcaaaaacaaaaccaagcaaaagatgagttcaggggagtttgccatcaagttggcaaaactgacttacttagggaagaaagttataaaacaggaaaatatgagatgaaccttgagtgatgtggaagatttagataaatggaaaggaaggagaaaatggagttctttaggtggttgtaattggaggaggaaatgaatacacacatcttgttgacttaaacccagacattcagcagctctctatacatatctggaaaagactgcacagtcacctcctgtctctcaccccaggtattacttagaattattatcatatttcccttcctttaaagtaagtaagggtgattggtgacaatatggagaactatgatttttccattaacctaataataattggtatttattgagttctgttaagcattttacatattaactcacttaagcctttcaacagccttgcaaaataggtattattatccccattttacaggcaagaaaactgaggtttaagtaacttgccgaagtgccatatacagggctcacattcagtattgcagttgcaaagctcatgatctatagtgccaagttgcaatattgtagtcaatgtcacaattattacccctttttatattccttgatatttttccatggcaaacaattagctatttcatttaataatcacctaaaacttttcagtcttctgattaaaattacgctggagtgatagaatgtattttcatgatagaaattgggaaaaaaaatggggaatgaagtttatcagcatttcagacttgtttttttttttttttttttgcaagactttgatgagattgttcacttttgtctatgtaaaatcccaaatccttgagaataaaaaagggggaggtttaagtcacttgttgcaatgccctttttaatagaggcaataaatctaaaggccataaatttagagtgacttacagaagatcgaactttggagtgtggcagagtaagggatggaaaccgggccctccagttcactatcagtagcttttgcactggtctgcccttcctaaattaagtatgcacttcaatttgatgagtggaaacagtctatctgggcagtaaccagggagctttgtgcctagtagattgcttctgttctgcacttctttggtttcccacctcaatgtaaaaaatagctagcaatgaagtccagaagttgtcaatggttcatccccagaagaatgcataatgtccaaagttgtatgtgtatgatgtcttcaatggtattaagttatttcaaattcttagttcacctacataaatcatttctaacaagcatcttcttaaccaactttatgcacagtgtatgtttgtaagtgcttctgcacgaatgtttatacatgactgtttccatagtacttatgtttttaaaaatattcagtcatttcctactataatcctcatgtatccatgtaactgactcaaaaatacttcagccacagaaagctaaaactgagcaaatctcattcttcttttccatcccctttgcatgtggctggcatttagtaatgattaataatatggccagctgaataacagaggtttgagacacaattctttctcaaaggagtcagctaagctgggtctacttatggacaaacatctaaatgtgtggaagtatctgatatttgacaatggtaaatttccacttagctagctagcattgtcagacttcaatctcctcatggctctggccgtcctgttttaagcatgataattgttggccacatctcacatagttctcattgagtgagttcataaataaacagggtttttttttttttttaaagagcagccaagcacaaagtgtgactttgttgacattttatgtgactttgtcatatgttcctaacccccaataaaagcaatgttgcatcaactgtgaaaaaaaaatga

SEQ ID NO: 107 - DNA, 2903 bp, Homo sapien
gagtagcattgctggatgtgcctcttttgttgaggtgattggatctttgggcaaaaaccagtgactgcaaaggatgagagaaacgatcagaaaaactgaaaagctgtaggagaccaaacactagtgtctcccctgcttcaggggacacccactgtcagagtgaacgacaaagacgcgcgtggatgatttgaagatattagcctaacaagatggaagcaggtttaaaattttacataagaagttacctttttcagttgtgttgatgttcctttcagctggtcctatagtacccctcctcaggaatgtctccccagtgcaaggacaaagactgaagagactgctatattgatggactctcaagccaactatgaagttgaaacaaagaaagtgatcacctgaagacacctcctctgctaagaaacacccccaaattgtgcagcttctgccactagaactctcagaacaagagacaatcttttcaagaaacagaaaaactcaataatgacatctagattttcatgagccaagaactttcccttcctcatgtgtattcctctgtttgtacttaaattcatgtgacattcatttttttcctagtatggatatgcttattaatgcacttgtttcaaaatcccaaattgcacaaatgtgttaatattttaagaaacaaaatgaatcctacaaggagaatgatttttagccacacatagggttggatcttgagagtgacctacagaataaaagtacttttaaaataaagtagtcagaggctattcaaagggtaaaataatcatagtaccacattggtccacttgacactaaccaatcgatcatttttttttaatcaagaaagctagattctatcagataaaatcactgcttctaaagagtttaaatctagttagaaaaagttatagaaatgtttgcaaagataagtaacagatagagtcagtagaggataagatcaaaaacaaaaccaagcaaaagatgagttcaggggagtttgccatcaagttggcaaaactgacttacttagggaagaaagttataaaacaggaaaatatgagatgaaccttgagtgatgtggaagatttagataaatggaaaggaaggagaaaatggagttctttaggtggttgtaattggaggaggaaatgaatacacacatcttgttgacttaaacccagacattcagcagctctctatacatatctggaaaagactgcacagtcacctcctgtctctcaccccaggtattacttagaattattatcatatttcccttcctttaaagtaagtaagggtgattggtgacaatatggagaactatgatttttccattaacctaataataattggtatttattgagttctgttaagcattttacatattaactcacttaagcctttcaacagccttgcaaaataggtattattatccccattttacaggcaagaaaactgaggtttaagtaacttgccgaagtgccatatacagggctcacattcagtattgcagttgcaaagctcatgatctatagtgccaagttgcaatattgtagtcaatgtcacaattattacccctttttatattccttgatatttttccatggcaaacaattagctatttcatttaataatcacctaaaacttttcagtcttctgattaaaattacgctggagtgatagaatgtattttcatgatagaaattgggaaaaaaaatggggaatgaagtttatcagcatttcagacttgtttttttttttttttttttgcaagactttgatgagattgttcacttttgtctatgtaaaatcccaaatccttgagaataaaaaagggggaggtttaagtcacttgttgcaatgccctttttaatagaggcaataaatctaaaggccataaatttagagtgacttacagaagatcgaactttggagtgtggcagagtaagggatggaaaccgggccctccagttcactatcagtagcttttgcactggtctgcccttcctaaattaagtatgcacttcaatttgatgagtggaaacagtctatctgggcagtaaccagggagctttgtgcctagtagattgcttctgttctgcacttctttggtttcccacctcaatgtaaaaaatagctagcaatgaagtccagaagttgtcaatggttcatccccagaagaatgcataatgtccaaagttgtatgtgtatgatgtcttcaatggtattaagttatttcaaattcttagttcacctacataaatcatttctaacaagcatcttcttaaccaactttatgcacagtgtatgtttgtaagtgcttctgcacgaatgtttatacatgactgtttccatagtacttatgtttttaaaaatattcagtcatttcctactataatcctcatgtatccatgtaactgactcaaaaatacttcagccacagaaagctaaaactgagcaaatctcattcttcttttccatcccctttgcatgtggctggcatttagtaatgattaataatatggccagctgaataacagaggtttgagacacaattctttctcaaaggagtcagctaagctgggtctacttatggacaaacatctaaatgtgtggaagtatctgatatttgacaatggtaaatttccacttagctagctagcattgtcagacttcaatctcctcatggctctggccgtcctgttttaagcatgataattgttggccacatctcacatagttctcattgagtgagttcataaataaacagggtttttttttttttttaaagagcagccaagcacaaagtgtgactttgttgacattttatgtgactttgtcatatgttcctaacccccaataaaagcaatgttgcatcaactgtgaaaaaaaaatga

SEQ ID NO: 108 - DNA, 2825 bp, Homo sapien
ctgaactccctggagagagggagagaaacagacttgtctttggacaaaattgagaagaactcataaacttggcttcctcgcttctgctcctcagacgcgcgtggatgatttgaagatattagcctaacaagatggaagcaggtttaaaattttacataagaagttacctttttcagttgtgttgatgttcctttcagctggtcctatagtacccctcctcaggaatgtctccccagtgcaaggacaaagactgaagagactgctatattgatggactctcaagccaactatgaagttgaaacaaagaaagtgatcacctgaagacacctcctctgctaagaaacacccccaaattgtgcagcttctgccactagaactctcagaacaagagacaatcttttcaagaaacagaaaaactcaataatgacatctagattttcatgagccaagaactttcccttcctcatgtgtattcctctgtttgtacttaaattcatgtgacattcatttttttcctagtatggatatgcttattaatgcacttgtttcaaaatcccaaattgcacaaatgtgttaatattttaagaaacaaaatgaatcctacaaggagaatgatttttagccacacatagggttggatcttgagagtgacctacagaataaaagtacttttaaaataaagtagtcagaggctattcaaagggtaaaataatcatagtaccacattggtccacttgacactaaccaatcgatcatttttttttaatcaagaaagctagattctatcagataaaatcactgcttctaaagagtttaaatctagttagaaaaagttatagaaatgtttgcaaagataagtaacagatagagtcagtagaggataagatcaaaaacaaaaccaagcaaaagatgagttcaggggagtttgccatcaagttggcaaaactgacttacttagggaagaaagttataaaacaggaaaatatgagatgaaccttgagtgatgtggaagatttagataaatggaaaggaaggagaaaatggagttctttaggtggttgtaattggaggaggaaatgaatacacacatcttgttgacttaaacccagacattcagcagctctctatacatatctggaaaagactgcacagtcacctcctgtctctcaccccaggtattacttagaattattatcatatttcccttcctttaaagtaagtaagggtgattggtgacaatatggagaactatgatttttccattaacctaataataattggtatttattgagttctgttaagcattttacatattaactcacttaagcctttcaacagccttgcaaaataggtattattatccccattttacaggcaagaaaactgaggtttaagtaacttgccgaagtgccatatacagggctcacattcagtattgcagttgcaaagctcatgatctatagtgccaagttgcaatattgtagtcaatgtcacaattattacccctttttatattccttgatatttttccatggcaaacaattagctatttcatttaataatcacctaaaacttttcagtcttctgattaaaattacgctggagtgatagaatgtattttcatgatagaaattgggaaaaaaaatggggaatgaagtttatcagcatttcagacttgtttttttttttttttttttgcaagactttgatgagattgttcacttttgtctatgtaaaatcccaaatccttgagaataaaaaagggggaggtttaagtcacttgttgcaatgccctttttaatagaggcaataaatctaaaggccataaatttagagtgacttacagaagatcgaactttggagtgtggcagagtaagggatggaaaccgggccctccagttcactatcagtagcttttgcactggtctgcccttcctaaattaagtatgcacttcaatttgatgagtggaaacagtctatctgggcagtaaccagggagctttgtgcctagtagattgcttctgttctgcacttctttggtttcccacctcaatgtaaaaaatagctagcaatgaagtccagaagttgtcaatggttcatccccagaagaatgcataatgtccaaagttgtatgtgtatgatgtcttcaatggtattaagttatttcaaattcttagttcacctacataaatcatttctaacaagcatcttcttaaccaactttatgcacagtgtatgtttgtaagtgcttctgcacgaatgtttatacatgactgtttccatagtacttatgtttttaaaaatattcagtcatttcctactataatcctcatgtatccatgtaactgactcaaaaatacttcagccacagaaagctaaaactgagcaaatctcattcttcttttccatcccctttgcatgtggctggcatttagtaatgattaataatatggccagctgaataacagaggtttgagacacaattctttctcaaaggagtcagctaagctgggtctacttatggacaaacatctaaatgtgtggaagtatctgatatttgacaatggtaaatttccacttagctagctagcattgtcagacttcaatctcctcatggctctggccgtcctgttttaagcatgataattgttggccacatctcacatagttctcattgagtgagttcataaataaacagggtttttttttttttttaaagagcagccaagcacaaagtgtgactttgttgacattttatgtgactttgtcatatgttcctaacccccaataaaagcaatgttgcatcaactgtgaaaaaaaaatga

SEQ ID NO: 109 - DNA, 2912 bp, Homo sapien
gtagggggaaaggccaagaaatatgtctgcgcttggagtttacacaagtctccttagcaacttgtctgcatttatttttcccttaatgtgtgtgggtttattccaaaccctgagtgaaacgggagttgagtttctgacagtcccctatttcccttctttgggggcaaaattgtttcatttgacgcgcgtggatgatttgaagatattagcctaacaagatggaagcaggtttaaaattttacataagaagttacctttttcagttgtgttgatgttcctttcagctggtcctatagtacccctcctcaggaatgtctccccagtgcaaggacaaagactgaagagactgctatattgatggactctcaagccaactatgaagttgaaacaaagaaagtgatcacctgaagacacctcctctgctaagaaacacccccaaattgtgcagcttctgccactagaactctcagaacaagagacaatcttttcaagaaacagaaaaactcaataatgacatctagattttcatgagccaagaactttcccttcctcatgtgtattcctctgtttgtacttaaattcatgtgacattcatttttttcctagtatggatatgcttattaatgcacttgtttcaaaatcccaaattgcacaaatgtgttaatattttaagaaacaaaatgaatcctacaaggagaatgatttttagccacacatagggttggatcttgagagtgacctacagaataaaagtacttttaaaataaagtagtcagaggctattcaaagggtaaaataatcatagtaccacattggtccacttgacactaaccaatcgatcatttttttttaatcaagaaagctagattctatcagataaaatcactgcttctaaagagtttaaatctagttagaaaaagttatagaaatgtttgcaaagataagtaacagatagagtcagtagaggataagatcaaaaacaaaaccaagcaaaagatgagttcaggggagtttgccatcaagttggcaaaactgacttacttagggaagaaagttataaaacaggaaaatatgagatgaaccttgagtgatgtggaagatttagataaatggaaaggaaggagaaaatggagttctttaggtggttgtaattggaggaggaaatgaatacacacatcttgttgacttaaacccagacattcagcagctctctatacatatctggaaaagactgcacagtcacctcctgtctctcaccccaggtattacttagaattattatcatatttcccttcctttaaagtaagtaagggtgattggtgacaatatggagaactatgatttttccattaacctaataataattggtatttattgagttctgttaagcattttacatattaactcacttaagcctttcaacagccttgcaaaataggtattattatccccattttacaggcaagaaaactgaggtttaagtaacttgccgaagtgccatatacagggctcacattcagtattgcagttgcaaagctcatgatctatagtgccaagttgcaatattgtagtcaatgtcacaattattacccctttttatattccttgatatttttccatggcaaacaattagctatttcatttaataatcacctaaaacttttcagtcttctgattaaaattacgctggagtgatagaatgtattttcatgatagaaattgggaaaaaaaatggggaatgaagtttatcagcatttcagacttgtttttttttttttttttttgcaagactttgatgagattgttcacttttgtctatgtaaaatcccaaatccttgagaataaaaaagggggaggtttaagtcacttgttgcaatgccctttttaatagaggcaataaatctaaaggccataaatttagagtgacttacagaagatcgaactttggagtgtggcagagtaagggatggaaaccgggccctccagttcactatcagtagcttttgcactggtctgcccttcctaaattaagtatgcacttcaatttgatgagtggaaacagtctatctgggcagtaaccagggagctttgtgcctagtagattgcttctgttctgcacttctttggtttcccacctcaatgtaaaaaatagctagcaatgaagtccagaagttgtcaatggttcatccccagaagaatgcataatgtccaaagttgtatgtgtatgatgtcttcaatggtattaagttatttcaaattcttagttcacctacataaatcatttctaacaagcatcttcttaaccaactttatgcacagtgtatgtttgtaagtgcttctgcacgaatgtttatacatgactgtttccatagtacttatgtttttaaaaatattcagtcatttcctactataatcctcatgtatccatgtaactgactcaaaaatacttcagccacagaaagctaaaactgagcaaatctcattcttcttttccatcccctttgcatgtggctggcatttagtaatgattaataatatggccagctgaataacagaggtttgagacacaattctttctcaaaggagtcagctaagctgggtctacttatggacaaacatctaaatgtgtggaagtatctgatatttgacaatggtaaatttccacttagctagctagcattgtcagacttcaatctcctcatggctctggccgtcctgttttaagcatgataattgttggccacatctcacatagttctcattgagtgagttcataaataaacagggtttttttttttttttaaagagcagccaagcacaaagtgtgactttgttgacattttatgtgactttgtcatatgttcctaacccccaataaaagcaatgttgcatcaactgtgaaaaaaaaatga

SEQ ID NO: 110 - DNA, 5921 bp, Homo sapien
gttcattgttcattggtcctttaagagagagctttagcttttacttgagggttgtaagcacattagaggaataattccctttggatactatacagaaggagccacctgcaaaatgttgatgctgttattgaagtctcaagtggaatcagctttcaaaaaattagatattagatacatccgatataatttgcaatgtgtaattatactaatgtgcatatagttgtctgttgctttacatgttgcctacttgagtttttttcttttcttgtgcatttctcatcattgaaatggttcctgagtagaatctttttaaaataagcttattttaaaaaaattctttgttaattaatatagggatacgaggactctacgatctgtgttcttatgcaagaataaatatgtgcgacctagatgttggaaattaattatctctgaaagggttatcattgtggacacttgcttaatttgtaaaatatttgctactcttgattgatttagtctttttctgactttagacaacttgaagtaattgagaatattagttcctttgttggaataacaaaatagaatgccagggaaatgaccttaggcagagataataattttaatttaaccaaagtaatcaaaacaataacaataatcagcaatttcttttattgtttttcactgttttgcatggcacatgttgaatactgaaactctgccttaggttatttgtgcactaacatcaacttcccttttaacgtcttgacatgatgtccaaggtctactgatggccccactggagagcctccttccagggaactgatccctgaagatctacctattaaggaatagcccagtcagagcaacagcgagttggctggtcagcctggtagttggctcagtaggtgaagaggctcttgatgcaaatttggagaatcattaccatcaggtcacagaaggaccccgggcaaggcaatacaagggtctcgatttatgcttatgtgtttgggagacaaaaaggattccaagggaggcttatattgagatacaagatatgactcattgcaattgagtaggcatagagcccaaagaaagctgatttgtagaacagttgactcatagtagacacttagaatatggtcattcacatatttatactatctgtttctcaaaatttgttttaatgatggagtccctattagaaagagacattttgcgtgatgtatagctacctaataccaaagcaatacaaggtttacttttcacctgctcatgtattcaaggatttgccatcattagatatccaaatgagccataaaaaattgtgcaaaatgttattccttaatacataacattttaatttattaaaaaatgagttttacaaatgagtatcaaaagcttagcaccccatcatccctgtcaatgttcacaaaataataaattctaaaatctttaagatgtatatttaattactcatccaagatcagttattgcatgcttaatcagaaaaatacctattaacgtttaacacttagttactttacagattaaaaaacatattatacctgccatctagggagccagcatcctcggtgtatcaaaagtgtttagggcagaaagcagtgatgtgtcatagtgtaccccttttggtgtgcctgacttattagacatcttcattgtgtaagcatgatgaagaggctgatgataaggtcttcagttaaagaaacatctacctgagaagtatattttattcataacaacttttataaaaaaagagaaacattaataacaactcttctcaaatacccttatctttaaaatgcatgggttggattagttgggctctaaattcttttacagctttaagaatttttgaaggtattctaaagtatggaggcataggaacaactccagaaccggtggatctggagctcatttgttccaacagtcgtccttcaaagttatatttgattccacctccacgttctgtatttactaacatattttgcgttgatgctaaaacagtaaggactggagttcactttcaggaaggggcagtagcagaaaagaagaacagctgaagaatgaaaaaagctacacagtgggagaagcaaattcttgatctgagttctaagcccatttctctcaattaacattaacatagaagaaaccccgacaagcacctgcctttctattttaagactatattctttaggcctgccttcatttaatttcttgcagtatggttcgtttttttccattggattaactcctttgagtttcacgtttttccttccacttgattcatttgagtcatcttaatattcctctcagaagcctacaatagttacagtaacacatcatacttcccaaattaaatcttaacgtgttcaaagccacctggaaattgccctaccccattttctaaaaccactcagaatgtgtaatctcttcttgaattaagtgagcctgctttctctggcttctaagtcattgaatatgctccaggatatgcttttcctttctgcataatctgtccccccacctcttctacactttgaaaaccttcttctttatttctctccttccctccatccttctcggtttttctcctttcccccttcctctctctttttctttcttttctttctttctctctttctttccttcctttctttttcgttcttctttttccttcttccttccttcattccttccttccatctttccgtctttccctctttcttttttttttctttttttctttccataccatgttctgtgccatgcgctgggaatacaaagacaaatacaaggaattgacaacacctaacaattctagtgacttcattcagccctgcattcctaagcagttatgtacccacagctatcttactttgttttcactccttggatttatttgaatctgtcctcaatgtcatgtgttcttttgttctttccctatgtgtcccattttagtaagttccctgttggataaacctgaagcttttcttacacagcattttctcccagagccattagagtggtgtctcacacacactcaggcaatgccattgctgactgattctttagcaaggggaacaatgtaaaacaacagcatttttctagtgatgcagcatttcatctctagtgagacttagcatggtccccaaagtatcattacatttatttattattactaaagagtcaatgtgataactttctgtgacatgttctgttatttttttagttgtgttgatgttcctttcagctggtcctatagtacccctcctcaggaatgtctccccagtgcaaggacaaagactgaagagactgctatattgatggactctcaagccaactatgaagttgaaacaaagaaagtgatcacctgaagacacctcctctgctaagaaacacccccaaattgtgcagcttctgccactagaactctcagaacaagagacaatcttttcaagaaacagaaaaactcaataatgacatctagattttcatgagccaagaactttcccttcctcatgtgtattcctctgtttgtacttaaattcatgtgacattcatttttttcctagtatggatatgcttattaatgcacttgtttcaaaatcccaaattgcacaaatgtgttaatattttaagaaacaaaatgaatcctacaaggagaatgatttttagccacacatagggttggatcttgagagtgacctacagaataaaagtacttttaaaataaagtagtcagaggctattcaaagggtaaaataatcatagtaccacattggtccacttgacactaaccaatcgatcatttttttttaatcaagaaagctagattctatcagataaaatcactgcttctaaagagtttaaatctagttagaaaaagttatagaaatgtttgcaaagataagtaacagatagagtcagtagaggataagatcaaaaacaaaaccaagcaaaagatgagttcaggggagtttgccatcaagttggcaaaactgacttacttagggaagaaagttataaaacaggaaaatatgagatgaaccttgagtgatgtggaagatttagataaatggaaaggaaggagaaaatggagttctttaggtggttgtaattggaggaggaaatgaatacacacatcttgttgacttaaacccagacattcagcagctctctatacatatctggaaaagactgcacagtcacctcctgtctctcaccccaggtattacttagaattattatcatatttcccttcctttaaagtaagtaagggtgattggtgacaatatggagaactatgatttttccattaacctaataataattggtatttattgagttctgttaagcattttacatattaactcacttaagcctttcaacagccttgcaaaataggtattattatccccattttacaggcaagaaaactgaggtttaagtaacttgccgaagtgccatatacagggctcacattcagtattgcagttgcaaagctcatgatctatagtgccaagttgcaatattgtagtcaatgtcacaattattacccctttttatattccttgatatttttccatggcaaacaattagctatttcatttaataatcacctaaaacttttcagtcttctgattaaaattacgctggagtgatagaatgtattttcatgatagaaattgggaaaaaaaatggggaatgaagtttatcagcatttcagacttgtttttttttttttttttttgcaagactttgatgagattgttcacttttgtctatgtaaaatcccaaatccttgagaataaaaaagggggaggtttaagtcacttgttgcaatgccctttttaatagaggcaataaatctaaaggccataaatttagagtgacttacagaagatcgaactttggagtgtggcagagtaagggatggaaaccgggccctccagttcactatcagtagcttttgcactggtctgcccttcctaaattaagtatgcacttcaatttgatgagtggaaacagtctatctgggcagtaaccagggagctttgtgcctagtagattgcttctgttctgcacttctttggtttcccacctcaatgtaaaaaatagctagcaatgaagtccagaagttgtcaatggttcatccccagaagaatgcataatgtccaaagttgtatgtgtatgatgtcttcaatggtattaagttatttcaaattcttagttcacctacataaatcatttctaacaagcatcttcttaaccaactttatgcacagtgtatgtttgtaagtgcttctgcacgaatgtttatacatgactgtttccatagtacttatgtttttaaaaatattcagtcatttcctactataatcctcatgtatccatgtaactgactcaaaaatacttcagccacagaaagctaaaactgagcaaatctcattcttcttttccatcccctttgcatgtggctggcatttagtaatgattaataatatggccagctgaataacagaggtttgagacacaattctttctcaaaggagtcagctaagctgggtctacttatggacaaacatctaaaattgggttcgggttggggggaaaaggtttaattgctttgggaattcaatttttttggaagccaatggtaaatttccacttagctagctagcattgtcagacttcaatctcctcatggctctggccgtcctgttttaagcatgataattgttggccacatctcacatagttctcattgagtgagttcataaataaacagggtttttttttttttttaaagagcagccaagcacaaagtgtgactttgttgacattttatgtgactttgtcatatgttcctaacccccaataaaagcaatgttgcatcaactgtgaaaaaaaaatga

SEQ ID NO: 111 - DNA, 1703 bp, Homo sapien
ctcatacatgcatgtgtgcttgaaattcccctaggatgtgaaacagttaggcagagaactgcactgtggtctcccttcctcacttctttccctccctgtttttccttttcgaaaatgtgatacctgatctctaggtcttgcgggctgagaaattttttgtatttgtataatgcagtgtctggccttccccctgacctgctgatgtatttttggcctcattagtagtcagggagatgccttagtgcatccagcactgcaagtcagggatgagacacactacaacaggagagggagcaagcgcgagaggatattagaagagaggcttgtctccaagatatggaaggaagtgagaaatgacagggctgcaagctttgtatgtaggagcccggcagggcgggggagcggcgaggagagccaagtggattctcagaaaaggggggaagccatcgaagagctaaaggtgattagagggggatattgatttcttattctgccagagatttaagcaggcatgcgaggaatctgcaccatggttggcaaaaagagacccgttgcctcctgtaaccagacactcaggctttccaggagcccagggagcaagccgagaagaaagggggcagtgtggtctaggaaaattcaacttgtcgctgatttgtgcctgatgcctgctgtccgtcagcagcctcccttacaatctttttttctctctctcctttttttttccttgccttctccttcttcactgaagcctaggggagccagtaaagattaaatgtgcttctcaaaggcagccacttcatgctgctatgtcgaaagggccattattattattatattttaatggtaaaagagaaaaggagagaggttgagcgagcgagagagaagctaggtgtgatgatgacagactagcttttctgagaggaaaaggaaaagggaagggagagaaaaaggagagcctctgagctcaacggaggattgtgcctgagaagaacccacagaggaggctgtgcgggccccgctccgcttcgaatggtggatgctgtggggcaccacctccttgaggaccaaggcactccagctgccaggaatttggctgctaacctcacacagctgagccttccatgaaaattgctctctgccaaagagaacttcctagtccaaggtcatgtctactctccagagatgtgactggagtgatttgcacccggatgcctagactcgccatctgctcaaagactgctcagaaagccctcccatgcattcccctgctgcataccagcccactctgcctgcagctgctgtctgcaggacttcatatctatgccacactgtgtaaaagctgtgcttcaagaaatcacaaaaacattttcctgcacctactacacagcctgagtgcggcataagttgaccttgcttgctaagaaatggggcaagaaatgcttttttgtgtgtgtcatgtctgtttgtttttcaattaagagaggaaagcattaggcagatggaatgtacatgtgaggatgaggagacagaaaacaagtagccctttccatcaagatagagggttttctggggttgctggctattgaatgtcactcctgatttctctttccaaggcactgtaccaccagcctactgagattgtgtgggagctttcatgggggttgtatttcactgatgaaaataaattttttgcataatgtgaa

SEQ ID NO: 112 - DNA, 1864 bp, Homo sapien
ctcatacatgcatgtgtgcttgaaattcccctaggatgtgaaacagttaggcagagaactgcactgtggtctcccttcctcacttctttccctccctgtttttccttttcgaaaatgtgatacctgatctctaggtcttgcgggctgagaaattttttgtatttgtataatgcagtgtctggccttccccctgacctgctgatgtatttttggcctcattagtagtcagggagatgccttagtgcatccagcactgcaagtcagggatgagacacactacaacaggagagggagcaagcgcgagaggatattagaagagaggcttgtctccaagatatggaaggaagtgagaaatgacagggctgcaagctttgtatgtaggagcccggcagggcgggggagcggcgaggagagccaagtggattctcagaaaaggggggaagccatcgaagagctaaaggtgattagagggggatattgatttcttattctgccagagatttaagcaggcatgcgaggaatctgcaccatggttggcaaaaagagacccgttgcctcctgtaaccagacactcaggctttccaggagcccagggagcaagccgagaagaaagggggcagtgtggtctaggaaaattcaacttgtcgctgatttgtgcctgatgcctgctgtccgtcagcagcctcccttacaatctttttttctctctctcctttttttttccttgccttctccttcttcactgaagcctaggggagccagtaaagattaaatgtgcttctcaaaggcagccacttcatgctgctatgtcgaaagggccattattattattatattttaatggtaaaagagaaaaggagagaggttgagcgagcgagagagaagctaggtgtgatgatgacagactagcttttctgagaggaaaaggaaaagggaagggagagaaaaaggagagcctctgagctcaacggaggattgtgcctgagaagaacccacagagtggatgctgtggggcaccacctccttgaggaccaaggcactccagctgccaggaatttggctgctaacctcacacagctgagccttccatgaaaattgctctctgccaaagagaacttcctagtccaaggtcatgtctactctccagagatgtgactggagtgatttgcacccggatgcctagactcgccatctgctcaaagactgctcagaaagccctcccatgcattcccctgctgcataccagcccactctgcctgcagctgctgtctgcaggacttcatatctatgccacactgtgtaaaagctgtgcttcaagaaatcacaaaaacattttcctgcacctactacacagcctgagtgcggcataagttgaccttgcttgctaagaaatggggcaagaaatgcttttttgtgtgtgtcatgtctgtttgtttttcaattaagagaggaaagcattaggcagatggaatgtacatgtgaggatgaggagacagaaaacaagtagccctttccatcaagatagagggttttctggggttgctggctattgaatgtcactcctgatttctctttccaaggcactgtaccaccagcctactgagattgtgtgggagctttcatgggggttgtatttcactgatgaaaataaattttttgcataatgtgaaaaaaaaaaaagaggcctcttggcctaccggggcttgcggcgtcccttagggggtaataataaccccccatgcccttgcctggcgtcggtgggggcggatcgtcctcaggcggattcggttcccaatcagggtcccccggaacactggacaaagctccaggccgacctaaagccggttggctttcaacgcgccct

SEQ ID NO: 113 - DNA, 1756 bp, Homo sapien
ctcatacatgcatgtgtgcttgaaattcccctaggatgtgaaacagttaggcagagaactgcactgtggtctcccttcctcacttctttccctccctgtttttccttttcgaaaatgtgatacctgatctctaggtcttgcgggctgagaaattttttgtatttgtataatgcagtgtctggccttccccctgacctgctgatgtatttttggcctcattagtagtcagggagatgccttagtgcatccagcactgcaagtcagggatgagacacactacaacaggagagggagcaagcgcgagaggatattagaagagaggcttgtctccaagatatggaaggaagtgagaaatgacagggctgcaagctttgtatgtaggagcccggcagggcgggggagcggcgaggagagccaagtggattctcagaaaaggggggaagccatcgaagagctaaaggtgattagagggggatattgatttcttattctgccagagatttaagcaggcatgcgaggaatctgcaccatggttggcaaaaagagacccgttgcctcctgtaaccagacactcaggctttccaggagcccagggagcaagccgagaagaaagggggcagtgtggtctaggaaaattcaacttgtcgctgatttgtgcctgatgcctgctgtccgtcagcagcctcccttacaatctttttttctctctctcctttttttttccttgccttctccttcttcactgaagcctaggggagccagtaaagattaaatgtgcttctcaaaggcagccacttcatgctgctatgtcgaaagggccattattattattatattttaatggtaaaagagaaaaggagagaggttgagcgagcgagagagaagctaggtgtgatgatgacagactagcttttctgagaggaaaaggaaaagggaagggagagaaaaaggagagcctctgagctcaacggaggattgtgcctgagaagaacccacagaggaggctgtgcgggccccgctccgcttcgaatggtggatgctgtggggcaccacctccttgaggaccaaggcactccagctgccaggaatttggctgctaacctcacacagctgagccttccatgaaaattgctctctgccaaagagaacttcctagtccaaggtcatgtctactctccagagaaatgcactgaccctgcactctacaggacactatgctcattccgaatgctaagatgtgactggagtgatttgcacccggatgcctagactcgccatctgctcaaagactgctcagaaagccctcccatgcattcccctgctgcataccagcccactctgcctgcagctgctgtctgcaggacttcatatctatgccacactgtgtaaaagctgtgcttcaagaaatcacaaaaacattttcctgcacctactacacagcctgagtgcggcataagttgaccttgcttgctaagaaatggggcaagaaatgcttttttgtgtgtgtcatgtctgtttgtttttcaattaagagaggaaagcattaggcagatggaatgtacatgtgaggatgaggagacagaaaacaagtagccctttccatcaagatagagggttttctggggttgctggctattgaatgtcactcctgatttctctttccaaggcactgtaccaccagcctactgagattgtgtgggagctttcatgggggttgtatttcactgatgaaaataaattttttgcataatgtgaa

SEQ ID NO: 114 - DNA, 1635 bp, Homo sapien
ctcatacatgcatgtgtgcttgaaattcccctaggatgtgaaacagttaggcagagaactgcactgtggtctcccttcctcacttctttccctccctgtttttccttttcgaaaatgtgatacctgatctctaggtcttgcgggctgagaaattttttgtatttgtataatgcagtgtctggccttccccctgacctgctgatgtatttttggcctcattagtagtcagggagatgccttagtgcatccagcactgcaagtcagggatgagacacactacaacaggagagggagcaagcgcgagaggatattagaagagaggcttgtctccaagatatggaaggaagtgagaaatgacagggctgcaagctttgtatgtaggagcccggcagggcgggggagcggcgaggagagccaagtggattctcagaaaaggggggaagccatcgaagagctaaaggtgattagagggggatattgatttcttattctgccagagatttaagcaggcatgcgaggaatctgcaccatggttggcaaaaagagacccgttgcctcctgtaaccagacactcaggctttccaggagcccagggagcaagccgagaagaaagggggcagtgtggtctaggaaaattcaacttgtcgctgatttgtgcctgatgcctgctgtccgtcagcagcctcccttacaatctttttttctctctctcctttttttttccttgccttctccttcttcactgaagcctaggggagccagtaaagattaaatgtgcttctcaaaggcagccacttcatgctgctatgtcgaaagggccattattattattatattttaatggtaaaagagaaaaggagagaggttgagcgagcgagagagaagctaggtgtgatgatgacagactagcttttctgagaggaaaaggaaaagggaagggagagaaaaaggagagcctctgagctcaacggaggattgtgcctgagaagaacccacagagtggatgctgtggggcaccacctccttgaggaccaaggcactccagctgccaggaatttggctgctaacctcacacagctgagccttccatgaaaattgctctctgccaaagagaacttcctagtccaaggtcatgtctactctccagagatgtgactggagtgatttgcacccggatgcctagactcgccatctgctcaaagactgctcagaaagccctcccatgcattcccctgctgcataccagcccactctgcctgcagctgctgtctgcaggacttcatatctatgccacactgtgtaaaagctgtgcttcaagaaatcacaaaaacattttcctgcacctactacacagcctgagtgcggcataagttgaccttgcttgctaagaaatggggcaagaaatgcttttttgtgtgtgtcatgtctgtttgtttttcaattaagagaggaaagcattaggcagatggaatgtacatgtgaggatgaggagacagaaaacaagtagccctttccatcaagatagagggttttctggggttgctggctattgaatgtcactcctgatttctctttccaaggcactgtaccaccagcctactgagattgtgtaaactggggatcctctaggtcacc

SEQ ID NO: 115 - DNA, 1446 bp, Homo sapien
gggcttggagggtcaaagcaaatatgctaatactcttattgcttgctgtgctgtgagtaaagtccattgtctctgacccaggaatcttgtgtcttctgccagcatccatgaatctgtcaggttatcttgtgagcttacaagtagtataaagtttcagcccttcacagttcttgaccaagttctgttctctctgcctaaaggcagcttgtgaaagaattctgcctttataggtctatgtgagccctatctcctatgagaaaaagagaagagagaagagagaaaaagagcacatacgtattgaatgtcccctgtttgccaagccatgctgagctgagctgagcttctcctacattatctcatttaatcctcataacaccctaggagtagatatcatcctgcctctttcatagatgaagagtcccaggcccaataaattgaagtgacttgccaagatcactcacagagtgtgaggttaaaacctaagcccgtctgttaagagagctactgatctttctgttatatcattctaggaagtcctttattttctgtgtattgaatagatgaccaatccaagataacaagagagatgctagcaagtctaaaatcatttccctaaccactctgttatctgttctatgatttttcccagttctatccctggacgtattcctcagcttaatgagcacttcttcatttttgtagtcttttgcctttccttttctaggaccccagcctccagccaatgttactccttttgcttagccttggacttcttgactcttgctattgctctaggatatttttttggagcgggggtctactcagaagaaaagatgggaagccctttctctgatatcactgtagaatgaataacactgtccagacgtcacagttctattctaaagaattcttgtttggttttcagatgtgactggagtgatttgcacccggatgcctagactcgccatctgctcaaagactgctcagaaagccctcccatgcattcccctgctgcataccagcccactctgcctgcagctgctgtctgcaggacttcatatctatgccacactgtgtaaaagctgtgcttcaagaaatcacaaaaacattttcctgcacctactacacagcctgagtgcggcataagttgaccttgcttgctaagaaatggggcaagaaatgcttttttgtgtgtgtcatgtctgtttgtttttcaattaagagaggaaagcattaggcagatggaatgtacatgtgaggatgaggagacagaaaacaagtagccctttccatcaagatagagggttttctggggttgctggctattgaatgtcactcctgatttctctttccaaggcactgtaccaccagcctactgagattgtgtgggagctttcatgggggttgtatttcactgatgaaaataaattttttgcataatgtgaa

SEQ ID NO: 116 - DNA, 1176 bp, Homo sapien
attccttttcccttgcagacttttttgtctgtccttgatttcttctttgacatcttctcttcccccattatcttttactctatcaaacctgattttaccccctgtataaaaatgcaaaagccatagtcgtttactcctacacacccttagcatttgctgggtgtttgtctctttggtctctcgagccttagatatctctaggccccattctagctcccatgagcaatttcacatcactatggacatgacctcaatgaaactggctatggtactctgggttttcaatgtacaattctatttcccttcctgtagtggatgctgtggggcaccacctccttgaggaccaaggcactccagctgccaggaatttggctgctaacctcacacagctgagccttccatgaaaattgctctctgccaaagagaacttcctagtccaaggtcatgtctactctccagagatgtgactggagtgatttgcacccggatgcctagactcgccatctgctcaaagactgctcagaaagccctcccatgcattcccctgctgcataccagcccactctgcctgcagctgctgtctgcaggacttcatatctatgccacactgtgtaaaagctgtgcttcaagaaatcacaaaaacattttcctgcacctactacacagcctgagtgcggcataagttgaccttgcttgctaagaaatggggcaagaaatgcttttttgtgtgtgtcatgtctgtttgtttttcaattaagagaggaaagcattaggcagatggaatgtacatgtgaggatgaggagacagaaaacaagtagccctttccatcaagatagagggttttctggggttgctggctattgaatgtcactcctgatttctctttccaaggcactgtaccaccagcctactgagattgtgtgggagctttcatgggggttgtatttcactgatgaaaataaattttttgcataatgtgaaaaaaaaaaaagaggcctcttggcctaccggggcttgcggcgtcccttagggggtaataataaccccccatgcccttgcctggcgtcggtgggggcggatcgtcctcaggcggattcggttcccaatcagggtcccccggaacactggacaaagctccaggccgacctaaagccggttggctttcaacgcgccct

SEQ ID NO: 117 - DNA, 1230 bp, Homo sapien
cgtgactatagagtaaggcagaatgagacaagtagatataagaaatggcagggcagggtcaaatcacatcaggatgggaacaaaaaaacaggagatttcagaaaggctaatgaatgaacgaatggaagtcagtgggcaatttcaatttcaatatgctgcgtatgacgtgagtaaggaaccaagtgcacactgctattgagatgggccttaacaactggataccattttgttgacagctctgatgtagatgggatggaattccaagtgctgggaatacttctagcagctaaagttaagagcgtaccagatgtgttcagagaaccttgagttgatctgaaaagagaatctgctcaaggagaaaacaattggatgctgtggggcaccacctccttgaggaccaaggcactccagctgccaggaatttggctgctaacctcacacagctgagccttccatgaaaattgctctctgccaaagagaacttcctagtccaaggtcatgtctactctccagagatgtgactggagtgatttgcacccggatgcctagactcgccatctgctcaaagactgctcagaaagccctcccatgcattcccctgctgcataccagcccactctgcctgcagctgctgtctgcaggacttcatatctatgccacactgtgtaaaagctgtgcttcaagaaatcacaaaaacattttcctgcacctactacacagcctgagtgcggcataagttgaccttgcttgctaagaaatggggcaagaaatgcttttttgtgtgtgtcatgtctgtttgtttttcaattaagagaggaaagcattaggcagatggaatgtacatgtgaggatgaggagacagaaaacaagtagccctttccatcaagatagagggttttctggggttgctggctattgaatgtcactcctgatttctctttccaaggcactgtaccaccagcctactgagattgtgtgggagctttcatgggggttgtatttcactgatgaaaataaattttttgcataatgtgaaaaaaaaaaaagaggcctcttggcctaccggggcttgcggcgtcccttagggggtaataataaccccccatgcccttgcctggcgtcggtgggggcggatcgtcctcaggcggattcggttcccaatcagggtcccccggaacactggacaaagctccaggccgacctaaagccggttggctttcaacgcgccct

SEQ ID NO: 118 - DNA, 898 bp, Homo sapien
tctgaagaatcaggccttactaagtgccctccagtggatgctgtggggcaccacctccttgaggaccaaggcactccagctgccaggaatttggctgctaacctcacacagctgagccttccatgaaaattgctctctgccaaagagaacttcctagtccaaggtcatgtctactctccagagatgtgactggagtgatttgcacccggatgcctagactcgccatctgctcaaagactgctcagaaagccctcccatgcattcccctgctgcataccagcccactctgcctgcagctgctgtctgcaggacttcatatctatgccacactgtgtaaaagctgtgcttcaagaaatcacaaaaacattttcctgcacctactacacagcctgagtgcggcataagttgaccttgcttgctaagaaatggggcaagaaatgcttttttgtgtgtgtcatgtctgtttgtttttcaattaagagaggaaagcattaggcagatggaatgtacatgtgaggatgaggagacagaaaacaagtagccctttccatcaagatagagggttttctggggttgctggctattgaatgtcactcctgatttctctttccaaggcactgtaccaccagcctactgagattgtgtgggagctttcatgggggttgtatttcactgatgaaaataaattttttgcataatgtgaaaaaaaaaaaagaggcctcttggcctaccggggcttgcggcgtcccttagggggtaataataaccccccatgcccttgcctggcgtcggtgggggcggatcgtcctcaggcggattcggttcccaatcagggtcccccggaacactggacaaagctccaggccgacctaaagccggttggctttcaacgcgccct

SEQ ID NO: 119 - DNA, 1157 bp, Homo sapien
ctcatacatgcatgtgtgcttgaaattcccctaggatgtgaaacagttaggcagagaactgcactgtggtctcccttcctcacttctttccctccctgtttttccttttcgaaaatgtgatacctgatctctaggtcttgcgggctgagaaattttttgtatttgtataatgcagtgtctggccttccccctgacctgctgatgtatttttggcctcattagtagtcagggagatgccttagtgcatccagcactgcaagtcagggatgagacacactacaacaggagagggagcaagcgcgagaggatattagaagagaggcttgtctccaagatatggaaggaagtgagaaatgacagggctgcaagctttgtatgtaggagcccggcagggcgggggagcggcgaggagagccaagtggattctcagaaaaggggggaagccatcgaagagctaaaggtgattagagggggatattgatttcttattctgccagagatttaagcaggcatgcgaggaatctgcaccatggttggcaaaaagagacccgttgcctcctgtaaccagacactcaggctttccaggagcccagggagcaagccgagaagaaagggggcagtgtggtctaggaaaattcaacttgtcgctgatttgtgcctgatgcctgctgtccgtcagcagcctcccttacaatctttttttctctctctcctttttttttccttgccttctccttcttcactgaagcctaggggagccagtaaagattaaatgtgcttctcaaaggcagccacttcatgctgctatgtcgaaagggccattattattattatattttaatggtaaaagagaaaaggagagaggttgagcgagcgagagagaagctaggtgtgatgatgacagactagcttttctgagaggaaaaggaaaagggaagggagagaaaaaggagagcctctgagctcaacggaggattgtgcctgagaagaacccacagaggaggctgtgcgggccccgctccgcttcgaatggatacagttaagctaatgatctcgagaggatatcgtcctggataagggtggagcctacgcccaaaaacaagattacctgaaagagaaaagaaagggggaaaacacacagagatacagtcggggag

SEQ ID NO: 120 - DNA, 757 bp, Homo sapien
tctgaagaatcaggccttactaagtgccctccagtggatgctgtggggcaccacctccttgaggaccaaggcactccagctgccaggaatttggctgctaacctcacacagctgagccttccatgaaaattgctctctgccaaagagaacttcctagtccaaggtcatgtctactctccagagaaatgcactgaccctgcactctacaggacactatgctcattccgaatgctaagatgtgactggagtgatttgcacccggatgcctagactcgccatctgctcaaagactgctcagaaagccctcccatgcattcccctgctgcataccagcccactctgcctgcagctgctgtctgcaggacttcatatctatgccacactgtgtaaaagctgtgcttcaagaaatcacaaaaacattttcctgcacctactacacagcctgagtgcggcataagttgaccttgcttgctaagaaatggggcaagaaatgcttttttgtgtgtgtcatgtctgtttgtttttcaattaagagaggaaagcattaggcagatggaatgtacatgtgaggatgaggagacagaaaacaagtagccctttccatcaagatagagggttttctggggttgctggctattgaatgtcactcctgatttctctttccaaggcactgtaccaccagcctactgagattgtgtgggagctttcatgggggttgtatttcactgatgaaaataaattttttgcataatgtgaa

SEQ ID NO: 121 - DNA, 784 bp, Homo sapien
gtagggggaaaggccaagaaatatgtctgcgcttggagtttacacaagtctccttagcaacttgtctgcatttatttttcccttaatgtgtgtgggtttattccaaaccctgagtgaaacgggagttgagtttctgacagtcccctatttcccttctttgggggcaaaattgtttcatttgacgcgcgtggatgatttgaagatattagcctaacaagatggaagcaggtttaaaattttacataagaagttacctttttcagatgtgactggagtgatttgcacccggatgcctagactcgccatctgctcaaagactgctcagaaagccctcccatgcattcccctgctgcataccagcccactctgcctgcagctgctgtctgcaggacttcatatctatgccacactgtgtaaaagctgtgcttcaagaaatcacaaaaacattttcctgcacctactacacagcctgagtgcggcataagttgaccttgcttgctaagaaatggggcaagaaatgcttttttgtgtgtgtcatgtctgtttgtttttcaattaagagaggaaagcattaggcagatggaatgtacatgtgaggatgaggagacagaaaacaagtagccctttccatcaagatagagggttttctggggttgctggctattgaatgtcactcctgatttctctttccaaggcactgtaccaccagcctactgagattgtgtgggagctttcatgggggttgtatttcactgatgaaaataaattttttgcataatgtgaa

SEQ ID NO: 122 - DNA, 742 bp, Homo sapien
ttatttgcctagcattataaattaaggaggaatagtaacaaagagcttgaagacatgcacagctcacaggccccgggtggaggctggcgacatcagacagacagaaccaagacatctgaggggcaaccaggaggtgcgtgtggctgcagagcacacagacttgtctttggacaaaattgagaagaactcataaacttggcttcctcgcttctgctcctcagatgtgactggagtgatttgcacccggatgcctagactcgccatctgctcaaagactgctcagaaagccctcccatgcattcccctgctgcataccagcccactctgcctgcagctgctgtctgcaggacttcatatctatgccacactgtgtaaaagctgtgcttcaagaaatcacaaaaacattttcctgcacctactacacagcctgagtgcggcataagttgaccttgcttgctaagaaatggggcaagaaatgcttttttgtgtgtgtcatgtctgtttgtttttcaattaagagaggaaagcattaggcagatggaatgtacatgtgaggatgaggagacagaaaacaagtagccctttccatcaagatagagggttttctggggttgctggctattgaatgtcactcctgatttctctttccaaggcactgtaccaccagcctactgagattgtgtgggagctttcatgggggttgtatttcactgatgaaaataaattttttgcataatgtgaa

SEQ ID NO: 123 - DNA, 410 bp, Homo sapien
gtagggggaaaggccaagaaatatgtctgcgcttggagtttacacaagtctccttagcaacttgtctgcatttatttttcccttaatgtgtgtgggtttattccaaaccctgagtgaaacgggagttgagtttctgacagtcccctatttcccttctttgggggcaaaattgtttcatttgacgcgcgtggatgatttgaagatattagcctaacaagatggaagcaggtttaaaattttacataagaagttacctttttcaggtaatggtgtttttctgtaattttcccaaacctttcgcttcctcaagtattgcaaatttttagggcatgcttgaatgatttaattatgaagaataactacattttaaacttaattttttaaaaaagaaaccagttttataattttcc

SEQ ID NO: 124 - DNA, 662 bp, Homo sapien
atgtgattcccaaggttgccaggctcagatgaatcaggagaaagaccatgaaagaggatggtatgtgtgaacttttatgagacaggccgggaagtgcacatgtcacttatactcgttttcttctggctggaactcagttctatggccacatctaactgcaaaggaggctgggaaacatagctctgttccaaggcataaggtaaagtgctggtggctaatctatcttggttatatagtatgttaagggctatctgatttaccctctatgccatggttgaattcttagaataacatctgtaataacatatgccattgttgaattcttagaataacatctgtaataacaagtccttgaacctctcgtcaaacctccttgatgaagattatacagaagcacttctgttgtttgatagggctgttgattggaaagaccttgcttctaaacagtagaagtctccttccctgcaactatcatccatggatccaagatctgctttgggaatcctacaacttgaattttgctcccttccattatgaagccctaaggcaagtggcttggagtaacccaccagagaaccagggccctattcattcattttggtatacccatgcttggcatgatggctggtcaatggtggaagcttaataaatgtctgctaaac

SEQ ID NO: 125 - DNA, 389 bp, Homo sapien
ctggaaacattaatctggacatgctggaggatgcaggtggatttagagccagaataacatctgtaataacaagtccttgaacctctcgtcaaacctccttgatgaagattatacagaagcacttctgttgtttgatagggctgttgattggaaagaccttgcttctaaacagtagaagtctccttccctgcaactatcatccatggatccaagatctgctttgggaatcctacaacttgaatttttgctcccttccattatgaagccctaaggcaagtggcttggagtaacccaccagagaaccagggccctattcattcattttggtatacccatgcttggcatgatggctggtcaatggtggaagcttaataaatgtctgctaaaca

SEQ ID NO: 126 - DNA, 664 bp, Homo sapien
atgtgattcccaaggttgccaggctcagatgaatcaggagaaagaccatgaaagaggatggtatgtgtgaacttttatgagacaggccgggaagtgcacatgtcacttatactcgttttcttctggctggaactcagttctatggccacatctaactgcaaaggaggctgggaaacatagctctgttccaaggcataaggtaaagtgctggtggctaatctatcttggttatatagtatgttaagggctatctgatttaccctctatgccatggttgaattcttagaataacatctgtaataacatatgccattgttgaattcttagaataacatctgtaataacaagtccttgaacctctcgtcaaacctccttgatgaagattatacagaagcacttctgttgtttgatagggctgttgattggaaagaccttgcttctaaacagtagaagtctccttccctgcaactatcatccatggatccaagatctgctttgggaatcctacaacttgaatttttgctcccttccattatgaagccctaaggcaagtggcttggagtaacccaccagagaaccagggccctattcattcattttggtatacccatgcttggcatgatggctggtcaatggtggaagcttaataaatgtctgctaaaca

SEQ ID NO: 127 - DNA, 707 bp, Homo sapien
tttcactttttaaaagcttaagctttatggaatgagggagcacggtggactctgacaggaaccttttcaaatcaatgctgaggctgtatttcttagccgtccacaaactagtccataggtaaagagcatacaaaacagacgccgaggtgatcagtgattccaaaggctgacgctcagcagcgccacctccatgccagccaactaggctacgggatggaggggcggtctgtgaaacaccagccatcccgtgaaagctcagcttgccactgtcatgtaacagggtgggtggtggcacagcagaggctcacacttgtcaccttcagcctctagaagctccccgtggggcacgaaggctggggacagagtgtcctgaggttttgttacaaggctagactttaaaatacctttcaaagtttcatcccgcctcatgtcgcaggactgctgtgtttgtgaaagcgcgtttgtttccacaagacaagctccgtgtagtcgccagcgggtgcctggcccaggagctgccctgtggagccagcgttgtccccgagctgctcgcctgtggccgtggctccttttctgaggctcctgactccattcttgcagattctggtggatcaggagcttacattctaaatgctacatagaggtgttgaagaaaatttcataggttctgtaatagtggatgggattaaaagaaaaaatgttaaatt

SEQ ID NO: 128 - DNA, 385 bp, Homo sapien
gctcgaggacggcggtggctgcggactgcagttagcgctgcgcgtgaggtggcggggcggcagccgcgcatcccggccctgtggcgtgttgggcgtgggggagcgtccttacacgttccagggtggcttttcccccacgtcctcgctcggtttctggaaagggggaggaaacgctgcagcttctacagtacttttgcttaagacaaagccagggatcaggaatctcaaaagagcagggggcagaaggtttgagccgaccccaccccggctctccatcggagccccgagcggcgccgtttcctgatgctggctgtgcgtagaggcggccttcctggggggaggggagaacaatgcttcttgaaaagccaaaagtcgtggaatttgg

SEQ ID NO: 129 - DNA, 387 bp, Homo sapien
gcggcggcgacggcggtggctgcggactgcagttagcgctgcgcggtgaggtggcggggcggcagccgcgcatcccggccctgtggcgtgttgggcgtgggggagcgtccttacacgttccagggtggcttttcccccacgtcctcgctcggtttctggaaagggggaggaaacgctgcagcttctacagtacttttgcttaagacaaagccagggatcaggaatctcaaaagagcagggggcagaaggtttgagccgaccccaccccggctctccatcggagccccgagcggcgccgtttcctgatgctggctgtgcgtagaggcggccttcctggggggaggggagaacaatgcttcttgaaaagccaaaagtcgtggaatttgg

SEQ ID NO: 130 - DNA, 423 bp, Homo sapien
gttttatcttatttcagttacaatttgcattttcataatgattaatgagactaagctttttttgtgtagttgactgtaccttggattttttccccaaatcccttttcatttcttattttctttatggttttagaaaatgtagtttacgtaattgcagcttgactttttcctcagttaatggcatgcttattggagagaaaaaagattaactatatttccctttttaattactgtgcttttttcttttttaaggtaatatttcattacattaaattttagtgttattctactgagctattccttaaatattatagtattttggatttcacatataaatttgtaacacatcttgagtttattatgtatagagtaaggctattttctttttttgttttttaaggtaaaaatcacataatataaaat

SEQ ID NO: 131 - DNA, 840 bp, Homo sapien
tgattaatgagactaagctttttttgtgtagttgactgtacctttggattttttccccaaatcccttttcatttcttattttctttatggttttagaaaatgtagtttacgtaattgcagcttgactttttcctcagttaatggcatgcttattggagagaaaaaagattaactatatttccctttttaattactgtgcttttttcttttttaaggtaatatttcattacattaaattttagtgttattctactgagctattccttaaatattatagtattttggatttcacatataaatttgtaacacatcttgagtttattatgtatagagtaaggctattttcttttttttgttttttaaggtaaaaatcacataatataaaattaataacaaccattttaaagcatacaatgcagttgcttttagtatattcacaatgttccaggacaatttcatcatgtcccttctaaaaacccattatccataaagttgttacaccctattctgcttccctgagccctaatgaccactaatctgatttatatcccaattgatttgccaattcctgatgtttcatctgaataaaatcaggtaatatttgtctttttgtgcacttaatgctttcaaatttcacccacattataccatgtataagtacttctttctttgttatagctaaaaattgggtgtccatttatgagtcaacaagcatatggattgtttccactttttgactgtatgattattactgctgtaaatattcatgcacatgtttgttatttgagcacctatgttttgtaagattaacagctgacttaacagaaacaatggaaggca

SEQ ID NO: 132 - DNA, 1016 bp, Homo sapien
agcggccgcccttttttttttttttttttttgagatggagtctcattcttttacccaagctggagtgcagtggcatgatttcggctcactgcaacctccgcctcttcggttcaagcgattctcctgcttcagcctccccagtagctggaattacaggtgcccaccaccatgctgggctaatttttgtatttttagtagagatggtgtttcatcagttggccaggctggtctccaactcctgacctccagtaatctgcctgcctcagcctcccaaagtgctgggattccaggcgtgagccaccacgcccggccggtagtttcaaatattctcacaggcacccaaaacggtgatggttcagaaggtctctcaggcatctaaacccacaaatgtgattacaaaataatgatctgattttgtgagtagcttgtggaatcagccaagttacttataatcacatctctttatgtgtgaatgtatggattgactaaaaaatcctctgatgaactgattttaattggtacgatctgctctgcagaaacttaaagacattatttttttccaaacaactaattttatcttcacgccccagcacacctgcacccctggtggggcacacctctccctctgaaaggtggcaaaagcagcagagcctgctttcccttgggcttaaagggagcaccccatacagaatgcttgcttggctgaagttaatgctgaccgttctgctttggagaccaactctcactgctgcacatggaaacccaagaccatgtacgcccactacgaagagaaatcacactgtgctcctgttaggattcttattgataatgtacaaccagcacattctgacagttttcagctccatatttgactgaaaaaacctcccagcccctctcaacacccactgcaagagcagatcttgctccttttgggatgggcatctacatcacggcaaatgtgcaacagccccacagctgtatttgtgccaaagatcagaggttttttttcctcgtgc

SEQ ID NO: 133 - DNA, 464 bp, Homo sapien
ggtttccatgtgcagcagtgagagttggtctccaaagcagaacggtcagcattaacttcagccaagcaagcattctgtatggggtgctccctttaagcccaagggaaagcaggctctgctgcttttgccacctttcagagggagaggtgtgccccaccaggggtgcaggtgtgctggggcgtgaagataaaattagttgtttggaaaaaaataatgtctttaagtttctgcagagcagatcgtaccaattaaaatcagttcatcagaggattttttagtcaatccatacattcacacataaagagatgtgattataagtaacttggctgattccacaagctactcacaaaatcagatcattattttgtaatcacatttgtgggtttagatgcctgagagaccttctgaaccatcaccgttttgggtgcctgtgagaatatttgaaactaccggccgggcgtggt

SEQ ID NO: 134 - DNA, 452 bp, Homo sapien
gcaggcttttgctgtctcctgatattgcagtttcaacatgagaggggcaggaaatagaagccccatgcgttgaaggactgctgtgcctgcacttatctctggccagggagtccttggacactgttttctttggcagccagctggtctaggtcacttgaattcctttgaagttcagggatacagggagcggtagccactgcctgcattccttactcaggaggcaggcatggggtctgccattgcttacctgccagagaaccaggccttcattagaaaggtcatttttatgtgactatgactgaatagtccagccttttccccttaagtgggattttgtgctgattcagcagtaaagaataagcccataccccccatttttgttgccattgctcacatttgaatttataggtggagaattggtgaagaaaacgtgatgtagatgcccatcccat

SEQ ID NO: 135 - DNA, 1406 bp, Homo sapien
gcaggcttttgctgtctcctgatattgcagtttcaacatgagaggggcaggaaatagaagccccatgcgttgaaggactgctgtgcctgcacttatctctggccagggagtccttggacactgttttctttggcagccagctggtctaggtcacttgaattcctttgaagttcagggatacagggagcggtagccactgcctgcattccttactcaggaggcaggcatggggtctgccattgcttacctgccagagaaccaggccttcattagaaaggtcatttttatgtgactatgactgaatagtccagccttttccccttaagtgggattttgtgctgattcagcagtaaagaataagcccataccccccatttttgttgccattgctcacatttgaatttataggtggagaattggtgaagaaaaaaaaacctttgatctttggtacaaatacagctgtggggctgttgcccacatttgccgtgatgtagatgcccatcccaaaaggagcaagatctgctcttgcagtgggtgttgagaggggctgggaggctttttcagtcaaatatggagctgaaaactgtcagaatgtgctggttgtacattatcaataagaatcctaacaggagcacagtgtgatttctcttcgtagtgggcgtacatggtcttgggtttccatgtgcagcagtgagagttggtctccaaagcagaacggtcagcattaacttcagccaagcaagcattctgtatggggtgctccctttaagcccaagggaaagcaggctctgctgcttttgccacctttcagagggagaggtgtgccccaccaggggtgcaggtgtgctggggcgtgaagataaaattagttgtttggaaaaaaataatgtctttaagtttctgcagagcagatcgtaccaattaaaatcagttcatcagaggattttttagtcaatccatacattcacacataaagagatgtgattataagtaacttggctgattccacaagctactcacaaaatcagatcattattttgtaatcacatttgtgggtttagatgcctgagagaccttctgaaccatcaccgttttgggtgcctgtgagaatatttgaaactaccggccgggcgtggtggctcacgcctggaatcccagcactttgggaggctgaggcaggcagattactggaggtcaggagttggagaccagcctggccaactgatgaaacaccatctctactaaaaatacaaaaattagcccagcatggtggtgggcacctgtaattccagctactggggaggctgaagcaggagaatcgcttgaaccgaagaggcggaggttgcagtgagccgaaatcatgccactgcactccagcttgggtaaaagaatgagactccatctca

SEQ ID NO: 136 - DNA, 903 bp, Homo sapien
gcaggcttttgctgtctcctgatattgcagtttcaacatgagaggggcaggaaatagaagccccatgcgttgaaggactgctgtgcctgcacttatctctggccagggagtccttggacactgttttctttggcagccagctggtctaggtcacttgaattcctttgaagttcagggatacagggagcggtagccactgcctgcattccttactcaggaggcaggcatggggtctgccattgcttacctgccagagaaccaggccttcattagaaaggtcatttttatgtgactatgactgaatagtccagccttttccccttaagtgggattttgtgctgattcagcagtaaagaataagcccataccccccatttttgttgccattgctcacatttgaatttataggtggagaattggtgaagaaaaaaaaacctttgatctttggtacaaatacagctgtggggctgttgcccacatttgccgtgatgtagatgcccatcccaaaaggagcaagatctgctcttgcagtgggtgttgagaggggctgggaggctttttcagtcaaatatggagctgaaaactgtcagaatgtgctggttgtacattatcaataagaatcctaacaggagcacagtgtgatttctcttcgtagtgggcgtacatggtcttgggtttccatgtgcagcagtgagagttggtctccaaagcagaacggtcagcattaacttcagccaagcaagcattctgtatggggtgctccctttaagcccaagggaaagcaggctctgctgcttttgccacctttctgctttggagaccaactctcactgctgcacatggaaacccaagaccatgtacgaccactacgaagagaaatcacactgtgctcctgttaggatt

SEQ ID NO: 137 - DNA, 298 bp, Homo sapien
gaaaaaaaaaaaactttatcagaagattcagaacactggttatgaagaaaacataattcaaacttccagagaaaaaaaaggtcacatacaaaaatcaggagtaacactagaagctaagatgtagtggaaaaatgttttcagatgtctgaagaaatattatttccaacaaataattcaatacctagacaaacaatcacttaagtgtaagggcagaaaaagaactttttcagccgggcgcgatggtcagcctgactaacatttagtatctctactaaaaatagaaaaactattagctggg

SEQ ID NO: 138 - DNA, 2107 bp, Homo sapien
ggggattatcattctttagtgttaatttgacaaaatgttctctttttttttcccctcctttcctccatcctttactctttactgtctatagttcttcctcggcaatcaggtacagtgtgccttgcaatgttctccttctcaatggatatggtctgtgtagctaatgctgcctgttcttcgctatggggagaggatgtaatctgaagcatgcctgggtcgcacctggttgtcttaccaagtggagaaactgttgatggggccagcattgcaaagctatcttagcagcaaaagaatataagtataattttttataaaggagatgaaatggaggaaagtgaagctatggtatcagtccattacacttctaagaagagcctggttttgtacttctgtgttagaagtcagattaccaaatagcacagttcttatttatattagaatcttttgacagttaataaattttgtaatgtatggtaagtcaattcctgaagaacttcagtactatttaaatatctttttaatatttgtagttacttatattgtatgttataattacaaggtatctgagaagtgtagtgtggagatcgtaattggccgtggcctgaagtatgctgattatggccagccagccaagatttaatgggaccaaattagacttgcaaaaaagattggatgctttgactccacttggtaactctaacctttcagatctttttgagtgctgtggggtcctgtgtcctccaatgtggaaggaagttgcatgagtaaaatctgtctctctgatatgaaattataaacactagttgttgatttcaggccctcaaacatcccaggccttgcaagtcactatagaaatgttctaggcaagtgggaagaacaggggataagagaaaaaaactaaagatgagaacaaactggctttaaaaaaacatcattgcttgagagtgtccaatatgcctatttgctaatgactgtgtgtgaatgctagggtgcctttgaagagtcctgacaccctcttctactgctccattgatcaggagagggtcagatgacttctaatgttgagaacggaattatgaagttcattttatacacaggcaactgaggcctcaaagatcacatgcctactctcacacagctagtgtcagccactgcaagaacccaagtctctgtaagaggttttccttttaaaaggtggaaacaacagttactgacccttaggactcttatttgttctttgcctcactgacaaccttgtcctaccaggtgtgcacaggtctccatttttagagctgccataatccctcctaccacttgtgactctggcctcaacttccccagctacactggctgctggcttggtcaaacctcctttcccccatagcttagcagaaacaagttagaatctttcaaagagagctttagtgtgaaattaaggttgggggggacatgaaatatatggagtgataaattatagtacacagtattccaagaataaagtactcttgtggttccttcctgattcaccctggggtacacacaggtgcatactccctgcctctcacccatccagagaaaaccctttgcagtgactcaggtccaagagcactgctcttgggtggaatcctccatatctctcagaacctcccacagggcttctcattttcacttgtgggggcccagcttctgagagggggctctcacagagcctggggggcagcttccttcccaggacaggacgtgtattctctttcaagtctgggttcagtgctgctgctaccacacagtgcttttgctgcagtcactttgtataaacatgtttaaattgtatcagatgaaaggtgtgggacttcttttattttcaaagtaaagggctgggagggaggatacagtatttttcaattgccttgcctgtgcaaatactgcatttgagtcagagcagctaaggaatatggagaattaccacaagtatattaattttgagggaggatggctatatgacctcagatatcctttcttgcattttcaatttttctgccttgttttaaagttacagttgtcctttataactttgaaaatcctggccgggcgtggtggcttatgcctg

SEQ ID NO: 139 - DNA, 2443 bp, Homo sapien
gagatggagtctcgttctgtcgcctaggctggagtgcagtggtgcgatcttggctcattgcaagctccgcctcctgggttcatgccattctcctgcctcagccttccgagtagctgggactacaggcgcccgccaccaggccggctaattttttgtatttttagtagagacggtgtttcaccgtgttagccaggttagtctcgatctcctgacctcgtgatctgcccgtctcggcctcccaaagtgctgggattacaggcataagccaccacgcccggccaggattttcaaagttataaaggacaactgtaactttaaaacaaggcagaaaaattgaaaatgcaagaaaggatatctgaggtcatatagccatcctccctcaaaattaatatacttgtggtaattctccatattccttagctgctctgactcaaatgcagtatttgcacaggcaaggcaattgaaaaatactgtatcctccctcccagccctttactttgaaaataaaagaagtcccacacctttcatctgatacaatttaaacatgtttatacaaagtgactgcagcaaaagcactgtgtggtagcagcagcactgaacccagacttgaaagagaatacacgtcctgtcctgggaaggaagctgccccccaggctctgtgagagccccctctcagaagctgggcccccacaagtgaaaatgagaagccctgtgggaggttctgagagatatggaggattccacccaagagcagtgctcttggacctgagtcactgcaaagggttttctctggatgggtgagaggcagggagtatgcacctgtgtgtaccccagggtgaatcaggaaggaaccacaagagtactttattcttggaatactgtgtactataatttatcactccatatatttcatgtcccccccaaccttaatttcacactaaagctctctttgaaagattctaacttgtttctgctaagctatgggggaaaggaggtttgaccaagccagcagccagtgtagctggggaagttgaggccagagtcacaagtggtaggagggattatggcagctctaaaaatggagacctgtgcacacctggtaggacaaggttgtcagtgaggcaaagaacaaataagagtcctaagggtcagtaactgttgtttccaccttttaaaaggaaaacctcttacagagacttgggttcttgcagtggctgacactagctgtgtgagagtaggcatgtgatctttgaggcctcagttgcctgtgtataaaatgaacttcataattccgttctcaacattagaagtcatctgaccctctcctgatcaatggagcagtagaagagggtgtcaggactcttcaaaggcaccctagcattcacacacagtcattagcaaataggcatattggacactctcaagcaatgatgtttttttaaagccagtttgttctcatctttagtttttttctcttatcccctgttcttcccacttgcctagaacatttctatagtgacttgcaaggcctgggatgtttgagggcctgaaatcaacaactagtgtttataatttcatatcagagagacagattttactcatgcaacttccttccacattggaggacacaggaccccacagcactcaaaaagatctgaaaggttagagttaccaagtggagtcaaagcatccaatcttttttgcaagtctaatttggtcccattaaatcttggctggctggccataatcagcatacttcaggccacggccaattacgatctccacactacacttctcagataccttgtaattataacatacaatataagtaactacaaatattaaaaagatatttaaatagtactgaagttcttcaggaattgacttaccatacattacaaaatttattaactgtcaaaagattctaatataaataagaactgtgctatttggtaatctgacttctaacacagaagtacaaaaccaggctcttcttagaagtgtaatggactgataccatagcttcactttcctccatttcatctcctttataaaaaattatacttatattcttttgctgctaagatagctttgcaatgctggccccatcaacagtttctccacttggtaagacaaccaggtgcgacccaggcatgcttcagattacatcctctccccatagcgaagaacaggcagcattagctacacagaccatatccattgagaaggagaacattgcaaggcacactgtacctgattgccgaggaagaaccggtatttattctctccgatctgctccacctgaaacctttttgcacatttgctgcttataggcataaactatttctaacacagacatttactttaaaatgtaaatgattggtagtagcttccagcattattttgcaagcttataacataccattctttaacataagttagt

SEQ ID NO: 140 - DNA, 595 bp, Homo sapien
cttgtagtcatcctagaaatcctccctctaccctacactccatatccaaccactgatcaagtcatcttgagtacatttacttaactcacatgcacggattcttcttgcattccccaccaccactgccttatttcaagctggctttatcctgtactggggcctattccaactagctctaaaccaatctaattccaaaattttcaccttccttcacactgggaggccttcctgaattataaatgaatggctcattaaatatagacctgtttagtgattttcaaactagggttcaggatctgccaattttccacaagcatcttatttggatccttaatatatatatgcagtatcttgaattacctggttgaccatttatgatggccctgatgtcaaataatacataaaaaccttaaagaactggacttcaacctactgtaaatgacacattggttccttatgaaaggcaacctgactaaaaagacgtggtcgaacaaagttatcccatggctacgatgcaaaaaaacatgcttcattactggtccctataaattcacactgatgcaatatagtttcagcaaaggcaacatcatcatcc

SEQ ID NO: 141 - DNA, 618 bp, Homo sapien
ctggtagtcatcctagaaatcctccctctaccctacactccatatccaaccactgatcaagtcatctggagtacatttacttaactcacatgcacggattcttctggcattccccaccaccactggccttatttcaagctggctttatcctgtactggggcctattccaactagctctaaaccaatctaattccaaaattttcaccttccttcacactgggaggccttcctgaattataaatgaatggctcattaaatatagacctgtttagtggattttcaaactagggttcaggatctgccaattttccacaagcatcttatttggatccttaatatatatatgcagtatctggaattacccgggttgaccatttatgactgggcacctgactgtcaaattaatacattaaaaaccttaaagaactggaccttcactactgtaacatgaccacattggttccttatgaaaggcaacctgactaaaaagacgtggtcgaacaaagttatcccatggctacgatgcaaaaaaacttggcttcattaatggtccctataaaaatccaccactgatgcaatcatagtttctcagcaaaagcaacaatcatcatccatggc

SEQ ID NO: 142 - DNA, 1733 bp, Homo sapien
agtgagggggagagggacacgttactaaagtcaggcaaatattttgaaaaaaatatattttgaaaaaaatagtttggtctaacaaaaataaaatggaagagagatttgtttaagtagtttgaagctgaaagattgacgggatcttgccatgacctgaacagcatgcacctgttttgtggctggctgaaggatggtaaataggatcaagatctcactttaagcgttgaaaatgctgaaagccctttctcaaacctgccatagcgtaggggtagacagtctttcttaaagcaactactaggggtcaaatgctgagtgaaatttttttcatctgtgaactttaaataatagccacatacattctgctaggcaactgagtctcaatttactataggccacgtggcaaataatcagattcaattaaagtcatcaaacaataattgtgtgtcgggcatcacgtttaggtattcaagatacaaacatgaatgagtttggtgaaaaagtcatatcatcatgggcatgaattctagttccctcacttattagctatgctaccttgggtcaattaacctctctgagactcagctttctcatctacaggataagaataataatcccttcctcataaggttgttgtgtgaatttaataatatattacttgtaaaacacttattggggtgggaaattaccttgatgcaatggtagcttccacgtacgagtcaggccatcccagagggtcatggaactcagatggctgagttcaaaaggctcagatcaaattgagatgcctgagtcacacagtttattaaatcaatttattttcattttaaataagtttattcaaacaagacatttgacttgaaaggaaaactaggatttttttttaagagtaatgtgtcattactgaaagattgccttacatgtaatagccaccgtgcctggcctcaaccccttttaaataaaaaaattttcacagccactttgatattgacttaaactacatatgtattgttacttaagtatgtacaaacctaagaccagtaataaactccttattcttggagctttacacaactaaaagtagatctataaattaaatacaaacaagactatagaaatggtaaaattccagtttacaaccaaaagcaatggatgatgatgttgctttgctgaaactatattgcatcagtgtgaattttatagtgaccattaatgaagcatgtttttttgcatcgtagccatgggataactttttctacaactctttttatcagttgcctttcataaggaacaaatgtgtcatttacatatttaattccattctttaagtttttatgtattatttgacatcagtgccatcataaatggtcaaccaggtaattcaagatactgcatatatatattaagaatcaaaataagatgcttgtggaaaattggcagatcctgaaccctagtttgaaaatcactaaacaggtctatatttaatgagccattcatttataattcaggaaggcctcccagtgtgaaggaaggtgaaaattttggaattagattggtttagagctagttggaataggccccagtacaggataaagcaagcttgaaataaggcagtggtggtggggaatgcaagaagaatccgtgcatgtgagttaagtaaatgtactcaagatgacttgatcagtggttggatatggagtgtagggtagagggaggatttctaggatgactacaag

SEQ ID NO: 143 - DNA, 4202 bp, Homo sapien
atggtggccaaagtggatgaggtgaagtccacaacccagtttcagatgaagaaggtgctatgtctggctgtggctgttggccatgtgaagatgacagacgatgagcttgtacataacattcacctggctgtcaacttcctagtgtcattactcaagaaaaattgccaagacattcaagctttatatactgagagcaccgtgggcaagcccacaccaaaagtagataaaaccacaaagatggggaaaaaacagaacagaaaaactggaagctccaaaaatcagagcgcctctcctcctccaaaggaacgcagctcctcaccagcaacagaacaaagctggatggagaatgactttgacgagctgagagaagaaggcttcagacgatcaaattactctgagctacgggaggacattcaaaccaaaggcaaagaagttgaaaactttgaaaaaaatttagaagaatgtataactagaataaccaatacagagaagtgcttaaaggagctgatggagctgaaaaccaaggctcgagaactacgtgaagaatgcagaagcctcaggagccgatgcgatcaactggaagaaagggtgtcagcaatggaagatgaaatgaatgaaatgaagcgagaagggaagtttagagaaagaagagtaaaaagaaatgagcaaagcctccaagaaatatgggactatgtgaaaagaccaaatctacatctgattggtgtacctgaaagtgatggggagaatggaaccaagttggaaaacactctgcaggatattatccaggagaacttccccaatttagcaaggcaggccaacgttcagattcaggaaatacagagaacgccacaaagatactcctcgagaagagcaactccaagacacataattgtcagattcaccaaagttgaaatgaaggaaaaaatgttaagggcagccagagagaaagaaatacaaactaccatcagagaatactacaaacacctctacgcaaataaactagaaaatctagaagaaatggataaattcctcgacacatacactctcccaagactaaaccaggaagaagttgaatctcttaatagaccaataacaggagctgaaattgtggcaataatcaatagcttaccaaccaaaaagagtccaggactagatggattcacagccgaattctaccagaggtacaaggaggaactggtaccattccttctgaaactattccaatcaatagaaaaagagggaatcctccctaactcattttatgaggccagcatcattctgataccaaagccgggcagagacacaacaaaaaaagagaattttagaccaatatccttgatgaacattgatgcaaaaatcctcaataaaatactggcaaaccgaatccagcagcacatcaaaaagcttatccaccatgatcaagtgggcttcatccctgggatgcaaggctggttcaatatacgcaaatcaataaatgtaatccagcatataaacagaaccaaagacaaaaaccacatgattatctcaatagatgcagaaaaagcctttgacaaaattcaacaacccttcatgctaaaaactctcaataaattaggtattgatgggacgtatttcaaaataataagagctatctatgacaaacccatagccaatatcatactgaatgggcaaaaactggaagcattccctttgaaaactggcacaagacagggatgccctctctcaccactcctattcaacatagtgttggaagttctggccagggcaattaggcaggagaaggaaataaagggtattcaattaggaaaagaggaagtcaaattgtccctgtttgcagatgacatgattgtatatctagaaaaccccattgtctcagcccaaaatctccttaagctgataagcaacttcagcaaagtctcaggatacaaaatcaatgtacaaaaatcacaagcattcttatacaccaacaacagacaaacagagagccaaatcatgagtgaactcccattcacaattgcttcaaagagaataaaatacctaggaatccaacttacaagggatgtgaaggacctcttcaaggagaactacaaaccactgctcaaggaaataaaagaggatacaaacaaatggaagaacattccatgctcatgggtaggaagaatcaatattgtgaaaatggccatactgcccaaggtaatttacagattcaatgccatccccatcaagctaccaatgactttcttcacagaattggaaaaaactactttaaagttcatatggaaccaaaaaagagcccacatcgccaagtcaatcctaagccaaaagaacaaagctggaggcatcacactacctgacttcaaactttactacaaggctacaataaccaaaacagcatggtactggtaccaaaacagagatatagatcaatggaacagaacagagccctcagaaataacgccgcatacctacaactgtctgatctttgacaaacctgagaaaaacaagaaatggggaaaggattccctatttaataaatggtgctgggaaaactggctagccatatgtagaaagctgaaactggatcccttccttacaccttatacaaaaatcaattcaagatggattaaagatttaaacgttagacctaaaaccataaaaaccctagaagaaaacctaggcattaccattcagaacataggcatgggcaaggacttcatgtccaaaacaccaaaagcaatggcaacaaaagacaaaattgacaaatgggatctaattaaactaaagagcttctgcacagcaaaagaaactaccatcagagtgaacaggcaacctacaaaatgggagaaaattttcgcaacctactcatctgacaaagggctaatatccagaatctacaatgaactcaaccaaatttacaagaaaaaaacaaacaaccccatcaaaaagtgggcaaaggacatgaacagacacttctcaaaagaagacatttatgcagccaaaaaacacatgaaaaaatgctcatcatcactggccatcagagaaatgcaaatcaaaaccacaatgagataccatctcacaccagttagaatggcaatcattaaaaagtcaggaaacaacagtgttcacaataggaaaggcatggaaccaacccaaatgtccatcaatgatagactggaataagaaaatgtggcacatatacaccatggaatactatgcagccataaaaaaggatgagttcatgtcctttgcagggacatggacgaaggtggaaaccatcattctcagtaagttatcacaaggacagaaaaccaaatagtgcatgttttcactcataggtgggaattgtacaatgagatcacttggacacagggtggggaacatcacacaccagggcctgttggggggttgggggctggtggagggatagcattacaagaaatacctaatgtaaatgatgagttgatgggtgcagcaaaccaacatggcacatgtatacctatgtatcaaacctgcacattgtgtacatgtaccccagaagttaaagtataagaaaaaaaaaaagagtgtagtgcagtcacccacgcactccggtcattcactcattcattcattcattcattcacaaaagaagcatttatgagttcctgctgtgtgccaggctctggcctaggcactgggaacagtgaacagaacagactcgactcagagctcaaggacttttagtccagttgaggagatcaatcatataattgatcaaataatcacagatttgtggtcgtaagtgtcctggggaaaactcaagcggaagggaagatgggagggtcaggtatatgtctgcgggtggagagtctgcagtttcctagagagtggtctgggaggcctctctgaagaggtgacatttgaacagaaccttagatgaagtgagggagggctcaggggacctgaggcaaagcagagggggccaccagtgcaaaggcgtgaggtaggatcgtgcttggggtgttcaagaaacaagaaggaggctggcgtgacgagcaccaaatgattgagcagaagtggagatgaagtcgcagagtgaactgagagtcagatggtggagggcattttatttcatttatttatttagagacagagtcttgctctggtgcccgagctgtgattgcaccactgctctccagcctgggcgacaaagccacaccctg

SEQ ID NO: 144 - DNA, 826 bp, Homo sapien
tgccagtgcgcgggcagcccacccaggcaactcccagcgagcggcccgcgcggagcccagggaggccggcagtgaagccggggagtcccggccgctcctctcggccgccccgggggttgcgagcgtggctctccgcaggcgggcagaagctgagggcgcggggcgcggaggaagcgccgcgccgctttgtctcttcacttcttgagcgcggcgagcggctcctcccgcggccggccgctcgggatcgcggcggcggcggcggcgacggcggctcctccttcacccctttcctttcctccccactctctcgtaggcagcggcggcggcggcagcggtggggaaaagcggattccgccccgaaccacaccgaggggagctcgtggtcgagacttgccgccctaagcactctcccaagtccgacccgctcggcgaggacttccgtcttctgagcgaaccttgtcaagcaagctgggatctatgagtggaaaggtgaccaagcccaaagaggagaaagatgcttctaagggtaagcccgcccgccgagtccgcctgctttcctttccttcgtttccctcgccccctcgcgtgcgcgccgccctccggcggctccttgcctccttcccggagcctaagctgcccatgacctctgcgaccccgggagaaaagggggggcagaggtcgctagggggtggatctaggtttgcaccactttccctccttcctcgcggaattgtcgaccctcgagtgcctccagcctcctccacttcccctctggacgcacggtggtggcgctgcgggcagacgaagctgctgcagcctggagcgc

SEQ ID NO: 145 - DNA, 2567 bp, Homo sapien
caccctccgcgtgcccacaccttgccgtttatatagaatgcgccgcggtgttgattcgtggctctctaggaccggagagttctttggaaggagagcgcgagcgagggagcgggcgagctccgagggggtgtgggtgtagggagagagagaaagagagcaggcagcggcggcggcggcagcggtggggaaaagcggattccgccccgaaccacaccgaggggagctcgtggtcgagacttgccgccctaagcactctcccaagtccgacccgctcggcgaggacttccgtcttctgagcgaaccttgtcaagcaagctgggatctatgagtggaaaggtgaccaagcccaaagaggagaaagatgcttctaagggagtttctctgcacaagctctctgtttgcctgctgtcgtccacataagatgtgacttgctcctgcttgccttcctccatgattgtgaggcctccccagccacgtggaactaggtgtcatgaggacaagcatgaaaaaagtagggatgcatcatttgagttcttcaggaggaagctactacctaattctggatgacgccccccctggcacacaggaatacattatgttacgacaagattccatccaatctgcggaattaaagaaaaaagagtccccctttcgtgctaagtgtcacgaaatcttctgctgcccgctgaagcaagtacaccacaaagagaacacagagccggaagagcctcagcttaagggtatagttaccaagctatacagccgacaaggctaccacttgcagctgcaggcggatggaaccattgatggcaccaaagatgaggacagcacttacactctgtttaacctcatccctgtgggtctgcgagtggtggctatccaaggagttcaaaccaagctgtacttggcaatgaacagtgagggatacttgtacacctcggaacttttcacacctgagtgcaaattcaaagaatcagtgtttgaaaattattatgtgacatattcatcaatgatataccgtcagcagcagtcaggccgagggtggtatctgggtctgaacaaagaaggagagatcatgaaaggcaaccatgtgaagaagaacaagcctgcagctcattttctgcctaaaccactgaaagtggccatgtacaaggagccatcactgcacgatctcacggagttctcccgatctggaagcgggaccccaaccaagagcagaagtgtctctggcgtgctgaacggaggcaaatccatgagccacaatgaatcaacgtagccagtgagggcaaaagaagggctctgtaacagaaccttacctccaggtgctgttgaattcttctagcagtccttcacccaaaagttcaaatttgtcagtgacatttaccaaacaaacaggcagagttcactattctatctgccattagaccttcttatcatccatactaaagccccattatttagattgagcttgtgcataagaatgccaagcattttagtgaactaaatctgagagaaggactgccaaattttctcatgatctcacctatactttggggatgataatccaaaagtatttcacagcactaatgctgatcaaaatttgctctcccaccaagaaaatgtaaaagaccacaattgttcttcaaaaacaaacaaaacaaaacaaaacaaaattaactgcttaaatgttttgtcggggcaaacaaaattatgtgaattgtgttgttttcttggcttgatgttttctatctacgcttgattcacatgtactcttttctttggcatagtgcaactttatgatttctgaaattcaatggttctattgactttttgcgtcacttaatccaaatcaaccaaattcagggttgaatctgaattggcttctcaggctcaaggtaacagtgttcttgtggtttgaccaattgtttttctttcttttttttttttttagatttgtggtattctggtcaagttattgtgctgtactttgtgcgtagaaattgagttgtattgtcaaccccagtcagtaaagagaacttcaaaaaattatcctcaagtgtagatttctcttaattccatttgtgtatcatgttaaactattgttgtggcttcttgtgtaaagacaggaactgtggaactgtgatgttgtcttttgtgttgttaaaataagaaatgtcttatctgtatatgtatgagtcttcctgtcattgtatttggcacatgaatattgtgtacaaggaattgttaagactggttttccctcaacaacatatattatacttgctactggaaaagtgtttaagacttagctaggtttccatttagatcttcatatctgttgcatggaagaaagttgggttcttggcatagagttgcatgatatgtaagattttgtgcattcataattgttaaaaatctgtgttccaaaagtggacatagcatgtacaggcagttttctgtcctgtgcacaaaaagtttaaaaaagttgtttaatatttgttgttgtatacccaaatacgcaccgaataaactctttatattcattcaaaaaaaaaaaaaaacatgta

SEQ ID NO: 146 - DNA, 460 bp, Homo sapien
caccctccgcgtgcccacaccttgccgtttatatagaatgcgccgcggtgttgattcgtggctctctaggaccggagagttctttggaaggagagcgcgagcgagggagcgggcgagctccgagggggtgtgggtgtagggagagagagaaagagagcaggtaagggccatcgtctcccactcctccgccggcgagcaactccggccccctttttggcaaaataataggaacctggaaatggattaaatagaaagaaagaaaagaggcgaccctctcctccccattccccgcgggcgagaagctgcgcgactctgcggtgtaacaggctcacacgttgctcatcacatgttcaaacatttccctttcagggaggcttgttatttttaagtgaatatttttatctttgttttgattttttaaaaagccttcctcggggttttattttgatcgagttggcgg

SEQ ID NO: 147 - DNA, 1489 bp, Homo sapien
ttaactggatggcactacacttcacacgtgggggagcaggtcgaactcaaaccatgcgaagtggccatgtacaaggagccatcactgcacgatctcacggagttctcccgatctggaagcgggaccccaaccaagagcagaagtgtctctggcgtgctgaacggaggcaaatccatgagccacaatgaatcaacgtagccagtgagggcaaaagaagggctctgtaacagaaccttacctccaggtgctgttgaattcttctagcagtccttcacccaaaagttcaaatttgtcagtgacatttaccaaacaaacaggcagagttcactattctatctgccattagaccttcttatcatccatactaaagccccattatttagattgagcttgtgcataagaatgccaagcattttagtgaactaaatctgagagaaggactgccaaattttctcatgatctcacctatactttggggatgataatccaaaagtatttcacagcactaatgctgatcaaaatttgctctcccaccaagaaaatgtaaaagaccacaattgttcttcaaaaacaaacaaaacaaaacaaaacaaaattaactgcttaaatgttttgtcggggcaaacaaaattatgtgaattgtgttgttttcttggcttgatgttttctatctacgcttgattcacatgtactcttttctttggcatagtgcaactttatgatttctgaaattcaatggttctattgactttttgcgtcacttaatccaaatcaaccaaattcagggttgaatctgaattggcttctcaggctcaaggtaacagtgttcttgtggtttgaccaattgtttttctttcttttttttttttttagatttgtggtattctggtcaagttattgtgctgtactttgtgcgtagaaattgagttgtattgtcaaccccagtcagtaaagagaacttcaaaaaattatcctcaagtgtagatttctcttaattccatttgtgtatcatgttaaactattgttgtggcttcttgtgtaaagacaggaactgtggaactgtgatgttgtcttttgtgttgttaaaataagaaatgtcttatctgtatatgtatgagtcttcctgtcattgtatttggcacatgaatattgtgtacaaggaattgttaagactggttttccctcaacaacatatattatacttgctactggaaaagtgtttaagacttagctaggtttccatttagatcttcatatctgttgcatggaagaaagttgggttcttggcatagagttgcatgatatgtaagattttgtgcattcataattgttaaaaatctgtgttccaaaagtggacatagcatgtacaggcagttttctgtcctgtgcacaaaaagtttaaaaaagttgtttaatatttgttgttgtatacccaaatacgcaccgaataaactctttatattcattcaaaaaaaaaaaaaaacatgta

SEQ ID NO: 148 - DNA, 1297 bp, Homo sapien
acagcacctggaggtaaggttctgttacagagcccttcttttgccctcactggctatgttgaattcttctagcagtccttcacccaaaagttcaaatttgtcagtgacatttaccaaacaaacaggcagagttcactattctatctgccattagaccttcttatcatccatactaaagccccattatttagattgagcttgtgcataagaatgccaagcattttagtgaactaaatctgagagaaggactgccaaattttctcatgatctcacctatactttggggatgataatccaaaagtatttcacagcactaatgctgatcaaaatttgctctcccaccaagaaaatgtaaaagaccacaattgttcttcaaaaacaaacaaaacaaaacaaaacaaaattaactgcttaaatgttttgtcggggcaaacaaaattatgtgaattgtgttgttttcttggcttgatgttttctatctacgcttgattcacatgtactcttttctttggcatagtgcaactttatgatttctgaaattcaatggttctattgactttttgcgtcacttaatccaaatcaaccaaattcagggttgaatctgaattggcttctcaggctcaaggtaacagtgttcttgtggtttgaccaattgtttttctttcttttttttttttttagatttgtggtattctggtcaagttattgtgctgtactttgtgcgtagaaattgagttgtattgtcaaccccagtcagtaaagagaacttcaaaaaattatcctcaagtgtagatttctcttaattccatttgtgtatcatgttaaactattgttgtggcttcttgtgtaaagacaggaactgtggaactgtgatgttgtcttttgtgttgttaaaataagaaatgtcttatctgtatatgtatgagtcttcctgtcattgtatttggcacatgaatattgtgtacaaggaattgttaagactggttttccctcaacaacatatattatacttgctactggaaaagtgtttaagacttagctaggtttccatttagatcttcatatctgttgcatggaagaaagttgggttcttggcatagagttgcatgatatgtaagattttgtgcattcataattgttaaaaatctgtgttccaaaagtggacatagcatgtacaggcagttttctgtcctgtgcacaaaaagtttaaaaaagttgtttaatatttgttgttgtatacccaaatacgcaccgaataaactctttatattcattcaaaaaaaaaaaaaaacatgta

SEQ ID NO: 149 - DNA, 612 bp, Homo sapien
gtgcccaggctgcctgcactgcccagataccacaggccttgccagggacctcctgagaggtttctgaggcttgcagccagtggtcccgttagtctgcacgtctccgagttgccctcccagaggagaaagcatatgctgctgggaccgactgcagctcctcatggatgcacctgccaccagaaaattgttgttcagtctgggattgctttctcttcccaaagcacaatctcacatgcagtcatgagcccagtccagcctctgggacagaagatttcgtgcttttataaaccaacagcactgcaggtgctgcacaaggaatggaaaatcaatctgagtgtcattaagagcatattccctgaagaagattgctgatgacagtggatttgtcacccagctcagtgtcttttcctgagcaataggaatttcttccatggggaatgaaacctagtgttgtttccctgtctgaatccaggcctttcactgacctgccaagttttcattccattgtctcactgtcattggctgatctgatctctacattgattaattagtttcaagccccttcatattgatctaataaaattggcttgtttaatttgtgtcaagaaaaaa

SEQ ID NO: 150 - DNA, 580 bp, Homo sapien
gtgcccaggctgcctgcactgcccagataccacaggccttgccagggacctcctgagaggtttctgaggcttgcagccagtggtcccgttagtctgcacgtctccgagttgccctcccagaggagaaagcatatgctgctgggaccgactgcagctcctcatggatgcacctgccaccagaaaattgttgttcagtctgggattgctttctcttcccaaagcacaatctcacatgcagtcatgagcccagtccagcctctgggacagaagatttcgtgcttttataaaccaacagcactgcaggtgctgcacaagagaaccaaaacaatttaaagagatgacggaggaactgcttttaacagtctttgaacaagttgccgaagaatcaatatccacagatcagaaggaaaattgttacctcacatttcaaaggtagattctggaaattacaggctgataatcttcacattagctaccagcaaatttctggaacagattatcaaacagtttgttaaaatatgtgaaaaggggagacatgattattatgttctaatatgcattcaccaaaaataaatgatca

SEQ ID NO: 151 - DNA, 1001 bp, Homo sapien
aaactttgagcggaccgggacagaaaaaaaaatctctctttgtcttgagggggctgttgagtggtcgcggacctgggctctgtgcgttgggaaagggaagtggaggtgagcctcgggcttcccgccctgtagctgggcccgccccagttgcagcgctcagccccaccccggctgggccaccgccctgcacagtctcagggatgagcagccgcccaagctgcagggcctcgggtcttcggcgcctctgaccctcgcaggttgctgcctttcggtgcagaaccgtatgtatgtcacacattggatgtgagacctgagaaaccgtgttttaacaggtttttctcctttcctggatacgtttatttctgggttagtcatgtttgttttaaagtagctcagaggtgtttgcatattaaacccatcaattggtaattactcaaagggcagtaatgtttaaaggttaagtgtggaaatagataaaaagatgtcattgcgattatatggtggtatctggcatttttaactttttgcatttttgaattttatttcttgaggttcaaggttgtgaaatgagtgctccaccccaccccccccttgccagcctgaacactgcctacacatattttgattagttcagttttaaattactagtaacttttaaaaacagacttttttagcagtaggcagcaataattctttgattattccagtgttattcagaatttctcagcatgttttcggaaggaaaaataccatgttttaattatttagttaattctttatatattttttatgttcaggagtacacttgagtccttagagttgactcaaagacttgctggtaaaggaagctgacacagatttacgaaaccttccttgacgaccctttaaaattttttaataggtagataaccatcctagaaatttgctgctttatggagtaagttggagaattgttgatattattgtgagtttgtgtgtgtgtgtgtttaaaaacaaaaaga

SEQ ID NO: 152 - DNA, 935 bp, Homo sapien
tttttcccccaaatgttaatatgtcatttctcagcaaaattatttgtaaagtaaaacatctaacaacaccaccaaaatcttgtaacagcaaaaggaagagctgagcttctgaagatcaaccttcgtgaggtcgaattagatcctgatattcaactggaagatatagccgagaagattgagggctattctggtgctgacatcactaatgtttgcagggatgcctctttaatggcaatgagacggcgtatcaatggcttaagtccagaagaaatccgtgcactttctaaagaggaacttcagatgcctgttaccaaaggagactttgaattggccctaaagaaaattgctaagtctgtctctgctgcagacttggagaagtatgaaaaatggatggttgaatttggatctgcttgaatttctgtcagctctttaatttctggtatttttgttgataaaatacgaagaaattcctgcaatttttaaaaaacaagtttggaatttttttcagtggagtggttttcgcttaaaggaaaaaaaaatctaaaactgcgaagaatactaaatgtagttgagaaataattgatggcgagagtttgctagtctccctccccggctttgtgctggtattccacgtattcctgcattaatattgcacacccaaaccagtctatcagggaggctgaagcaagggcgcagtgtgatattttaggaatacagaagatttagaaatacccctatttctcatttgcagtttttttttccaattctgtgctctgtcaacatgagggacctatctatgtatgttgacttttaacatcaaaattggatttgtgtcaaacattcattgttaagagaagaatgacagtatattttggaggaaataatgaatttactaattaaacctttagaatttaaaaaaaaaaaagggggggccg

SEQ ID NO: 153 - DNA, 906 bp, Homo sapien
gctgccatggcaacactacgccgccgccgccttttcacgcgcgtcgcgagctaacggactcggcggcggcggcggcggcggcctgcgccccacccgcaccccatctggaccgcatcgctgaatgtgcccggacctgcgccttctgggtctctgaaagaagatgaatttggctgagatttgtgataatgcaaagaaaggaagagaatatgcccttcttggaaattacgactcatcaatggtatattaccagggggtgatgcagcagattcagagacattgccagtcagtcagagatccagctatcaaaggcaaatggcaacaggttcggcaggaattattggaggaatatgaacaagttaaaagtattgtcagcactttagaaagttttaaaattgacaagcctccagatttccctgtgtcctgtcaagatgaaccatttagagatcctgctgtttggccaccccctgttcctgcagaacacagagctccacctcagatcaggcgtcccaatcgagaagtaagacctctgaggaaagaaatggcaggagtaggagcccggggacctgtaggccgagcacatcctatatcaaagagtgaaaagccttctacaagtagggacaaggactatagagcaagagggagagatgacaaggcaagatgctgtctttctgtaattcactcacttgaagcccaggacttttggtggatgttatgatttttgttggcttttcaagataccctggttttgacgtggaagagttagaaaaaagtctcattcaaagcctaagtagtctttgtattttgaaggccatgctgcaatgcaaatcacctcagaggcgtagtaaatatctatatacacatacatgtataaaaatatttagtgaaatggatccctgtaagaaaaaa

SEQ ID NO: 154 - DNA, 1688 bp, Homo sapien
cagagagaggagagggagaaggagagaggggcagaggggaagggagagagggagagcacgcgagacggaaaggagcgcctcagagtctctgaagcacgcaagagataaccgattaggaatttttcgggcaactgtcacccggatagctgtcagagaatcatcatcaccgcaactctgacgtttcctacaagaagttagagacttaagcagtattggcatcggatggaaatgggatgcatgctgctgtggaaaatatccctgagctgaagaagtgcaactatgtgttgtgtgtgctaaatgcccagaagaacccagacccagtgggtaagagagacgaaatgtggagagaatgactaacgacaaatccgtgaatttgttctctggagttgctaatttgccagcccgaagcaacacattttacaaggaggaaacattttgctgcttctgatttctccccaaactggtgctaccagatgcatggctttctatgtgttggaacaaatcattcctaactgcagcatactgggaaaggggaaaggttgaggcaactaacctaacgtaagtgtaaagtttcgcatgcacaattgtaaattctgtgtttagatgtgtcctcagtgtaggcgaaagatgcttgtaattgggtagacggttggggcagagctcacctactcggctgtatctgcatccctacctgcatcactctgccggaactaatcgcgggcatcagctactgtgcagcctaatgcagataagattagagcctgagaactgaccagtcctactcaagtaggtagctgcctggagccttgcacccatttaaactgcagttatctaagcagaagcctttttacctgcatgattgggttgcagtatttatgtgtggcaaatgttactaatattctaaccagagatcaggattaagaaattgcattttttttctcttttatgttcagtagaaaatattgtgatgttacatgggaatgttagctgcgtttcacttatatctcggcactctcttccacctctaggaaaatgaatcctatattattatacatttttaaaagttttaatgtgtttatgaatcctaatgaggataatttgtcaatatggagaaaggagagcaagctgtgggcaagaaatctgaagtcttgttgttgtgcttttaggcaatgaggatgtgtagaggccggtgactattgcttctgatgccgctgcagcggcatgtccggatgctcgtttcccagtaagattgtattagaaggcagttgaagaactgggaggaaagaaaaagatagcctttttagaaaagataggtgactcagtggggcagagaagaaaacacatttgacatgtgacaaagcaattagcaggaaccgtagctaaatacttagtgtttttcacttgcacctgaaaagactgagggaggtaggttagaggctaggaggagggtgagacagggggaggggaagaggagaacaagaatgcatgttttgaattaaacagtattctgaaaaacaacgtgcgtgaatataggtaaaaatagcagctgtccttaattcaaaagtagaaaattttattttctcccggcaaatgcaaccagcaggagatatttagtgtttttctccacagagtaaacttgcaaacagtggcagagcaaactgccatgtttactaatgttcaggggaaac

SEQ ID NO: 155 - DNA, 6122 bp, Homo sapien
cagagagaggagagggagaaggagagaggggcagaggggaagggagagagggagagcacgcgagacggaaaggagcgcctcagagtctctgaagcacgcaagagataaccgattaggaatttttcgggcaactgtcacccggatagctgtcagagaatcatcatcaccgcaactctgacgtttcctacaagaagttagagacttaagcagtattggcatcggatggaaatgggatgcatgctgctgtggaaaatatccctgagctgaagaagtgcaactatgtgttgtgtgtgctaaatgcccagaagaacccagacccagtgggtaagagagacgaaatgtggagagaatgactaacgacaaatccgtgaatttgttctctggagttgctaatttgccagcccgaagcaacacattttacaaggaggaaacattttgctgcttctgatttctccccaaactggtgctaccagatgcatggctttctatgtgttggaacaaatcattcctaactgcagcatactgggaaaggggaaaggttgaggcaactaaccggctgtctccaaataagtgatgagatataatgcatcctccagtccatgcacgcttcctcttgcaatttgtgcatcattcctcagtggaaacctttaaaccctaaaatccaggaaaagaaaataaatacattatcatggacctgagggatttttacctgttggctgctctgattgcctgtttaaggctggattccgcaatagctcaagaacttatttacactattagagaggaattgcctgaaaatgtgcccataggaaacataccaaaggatctgaacatttctcacatcaatgctgccacagggaccagcgccagccttgtctacagactggtttctaaagctggggatgcccctttggtgaaagtatccagcagcactggggaaattttcacaacctccaacagaatagacagagaaaaactctgtgctggcgcctcatatgctgaggagaatgagtgtttctttgaacttgaggtggtgatcctccccaatgatttcttcaggctgatcaaaataaaaataattgtcaaggataccaatgataatgcccccatgtttccatctcctgtcatcaatatttccattccagaaaacactttgatcaacagccgctttccaattccatcagcaacagatcctgacacaggcttcaatggtgtacagcattatgaattgttaaatgggcagagtgtttttggactggatatcgtggaaactccagagggagagaagtggccacaactgattgttcagcaaaacttggatagagaacagaaagatacctatgtgatgaaaatcaaagtagaggatggaggcactccacagaaatccagtacggccatactgcaggtcacagtaagtgatgtaaatgacaacaggccagtgtttaaagagggtcaagtggaggtgcatattccagagaatgctcccgtaggtacctctgtaattcagctccatgccactgatgcagatataggcagtaatgctgaaatccggtacatttttggtgcccaggtcgcccctgcaaccaaaagactctttgctttaaataatactactgggctgattacagttcagaggtccttagatagagaggagacagccattcacaaagtgacagtgctggctagtgacggcagctccactcctgctcgagcaacggttaccatcaatgtcaccgatgtaaatgataaccctcctaatatagacctcaggtacattataagtcccatcaatggcaccgtgtatttatctgagaaagatcctgtcaatacaaagattgccctaattacagtttcagataaggacacagatgtgaatggcaaagtgatctgttttattgaaagagaggtcccatttcatttgaaggcggtatatgacaaccaatatttgttagagacctcttctttgttggactatgagggcaccaaagaattcagctttaaaattgttgcctctgattctgggaagcccagtttaaatcagactgccctggtaagggttaagcttgaggatgaaaatgacaacccaccaattttcaaccagcctgtaattgagctgtcagtttctgaaaacaaccgacgtgggttatacttaacaactattagtgccacagatgaagacagtgggaaaaatgcagacattgtttatcagcttggaccgaatgcctccttctttgatctggaccgaaaaacaggagttttgacagcctccagagtatttgacagagaagaacaagaacgattcatttttacagtaactgccagggataatgggacccctcccctccaaagccaagcggctgtgattgttactgttctggatgagaatgacaatagccccaagtttactcataatcattttcaattttttgtgtctgagaatctgccaaagtatagtactgtgggggtaatcacagtgacagatgcagatgctggagagaataaagctgtgactctttccattctaaatgacaatgataattttgtgttggatccctattctggagtcataaagtcaaatgtctcatttgatagagagcagcagagttcctacacttttgatgtcaaagccactgatggaggacaaccacctcgttcctctactgcaaaagtaactatcaacgtcatggatgtcaatgacaacagcccagttgtcatttctccaccgtctaatacttcctttaagttggtgcccctctcagccattcctggctccgtggtagcagaagtttttgcagtggatgttgacactggaatgaacgctgaactaaagtatactatagtgagtggaaacaataaaggcttattccggattgatccagtaacaggtaacattactctggaagaaaaaccagcacctactgatgtgggattgcatcgtttggtggtcaacataagtgacctggggtaccctaagtctttgcacacgcttgtgcttgtattcctttatgttaacgacactgctggaaatgcctcctatatctatgacttgatccgcaggactatggagaccccgttggacaggaacataggggatagtagccaaccctatcaaaatgaggactatctaaccatcatgattgccatcatcgccggtgccatggtggtcattgttgtgatcttcgtcaccgttctggtgcgctgtcgccatgcatcaaggttcaaagcagctcagaggagcaagcaaggtgccgaatggatgtccccaaaccaggagaacaagcaaaacaagaaaaagaaaagaaagaaaaggaagtctcccaaaagctctcttttgaactttgttactatcgaagagtccaaacccgatgatgcagttcatgaacctatcaatgggacaataagcctgccggctgaactggaggagcaaagtataggaagatttgactggggcccggcacctccaacaacattcaagcctaacagtcctgacctggccaagcactacaaatctgcttctccacagcctgcttttcatctcaaaccagacactccagtttccgtgaaaaagcaccacgtgattcaggaactccctttggacaacacctttgttgggggttgtgacaccctttctaaacgctcttccactagttcagatcacttcagtgcctcagagtgcagttcccaaggaggcttcaagacaaagggccccttacacaccagacagtcgcagcgccgtgttacgtttcatctccctgatggctcccaggaaagctgcagtgacagtggtctaggagaccatgagccggtgggtagtggaaccctgatctcacaccctcttcctctggttcagccacaggacgaattctatgaccaggcctctccggacaagaggactgaagcagatggcaactctgatcccaactctgatgggcctttgggtccccgaggattagctgaagctacagagatgtgcactcaagagtgcttggttttgggtcactctgataattgctggatgcctcctggcttgggtccatatcaacaccccaaatctcctctctcaacctttgcaccccagaaagaatgggtgaagaaggacaagcttgtgaatgggcacaccctgaccagagcctggaaagaagacagcaacaggaaccagttcaatgaccgtaagcagtatggctccaatgaaggccatttcaacaatggcagccacatgacagacattcctctggcaaatctgaagtcttataagcaagcaggaggtgctactgagagtcctaaggagcaccaactctaagaaaaggctatatgggacctaataactttaaatagacatgctaataccgtgtgcgtcagagctttatgtattcaatagatctctacaactatgccccttctagcagggatacctataactttgtgttagcaccatggagaatacaatgtttttgcaacatatgagagaagatagttctagccatgcaattttgtttactagaattgattacactctccagagatctctccattgtgcaaattttttttattattgcattttattttgaccctggactgctgctatgaacaatagaatatgcatttggaaagtaagaaagtttcatggattagagtgactgaaaaacatatccagttagaaaattgtgcttttttttttttttttttttgtcattgatttgtgctgggactgctatacttgacattatactgcaaacaaaacttaaagagataagcattaaacctattgtgctgttaacaacgttagtggacacttgtaagtcaatcagtgttaaagtatttgtaaatagaagcaagctattattaacaacttttgtgtacttataatgttcacctaaaaatgttgtagcataattctgtgttttatggttgcttctgtccttctttttatttacctctttgttgttatttttgttgtttctttcagtgaggtgtttctgtgttagtagtctgtcttgacacacattgttcaaacaatctcaagcacttgtgtttaaaaaaggttctgaaatcttgcttctcatatgatagcttatgatgccggaattctgtaaacaataaagatgaaagaaaaaatgaaaactttatacaaaaaaggacttctgcaaaagcttggaaattcagaacctattttttatcatcttattttcaaagtaggcaaaagcaaaatcacttaattagtaccattaagtgagagagtaatggaaaactgttatccatcaaaagtgatataatatcctgtacttgtcactcatgtaaaactaatgtatcaaaattagcatatatggaagaaaaatcactattcaaaaatagtttcaattgggcaaatgtgtgtctacaactttgttgaaatggcagagtctgtgttgatcctcatatacaataatgttgttgtaacacaagtgttattagaccatagccacaaaatatttaatgtgttgtgccttcatgatgtaacagaacattctccaggtagggtagttgggggaaataaagggataaatctctaattattgctgtttaactgtttgttatcatagttggtcaatgcctggcaggtaccagcatattgtcacttaggtcaaaccaataaagtgacaactaatgttaataagatctcagttgcacgtgcaaacaaatccaaattcgaacattcttaggaggtttttgttaaggcatgacagatgatttaaacaaataaatagcatgcaacaaaatgtctttattgaaagaagtggaagttatcttaatgccacggttcaccatcaatttaaaagtaaaaaaaacaaaaaaaaaacaaaaaatttaaaaaaaaggtttgctaatctgatagttaatttgttcttaccaaaaaataaaattactttgtaaatagcagttcacatttttccacagtataatggaaaataatgggtaggggtgcattgcttattgaagtacatttttgtcggtttgtgaggggtgtttgatgactttgacagaataaatatctaaacaattatccttgttactgctttgccagttctacgttatttacaattattcagctcttgcaataaatgttctgaattcctgaaaaaaaa

SEQ ID NO: 156 - DNA, 4880 bp, Homo sapien
cagagagaggagagggagaaggagagaggggcagaggggaagggagagagggagagcacgcgagacggaaaggagcgcctcagagtctctgaagcacgcaagagataaccgattaggaatttttcgggcaactgtcacccggatagctgtcagagaatcatcatcaccgcaactctgacgtttcctacaagaagttagagacttaagcagtattggcatcggatggaaatgggatgcatgctgctgtggaaaatatccctgagctgaagaagtgcaactatgtgttgtgtgtgctaaatgcccagaagaacccagacccagtgggtaagagagacgaaatgtggagagaatgactaacgacaaatccgtgaatttgttctctggagttgctaatttgccagcccgaagcaacacattttacaaggaggaaacattttgctgcttctgatttctccccaaactggtgctaccagatgcatggctttctatgtgttggaacaaatcattcctaactgcagcatactgggaaaggggaaaggttgaggcaactaaccggctgtctccaaataagtgatgagatataatgcatcctccagtccatgcacgcttcctcttgcaatttgtgcatcattcctcagtggaaacctttaaaccctaaaatccaggaaaagaaaataaatacattatcatggacctgagggatttttacctgttggctgctctgattgcctgtttaaggctggattccgcaatagctcaagaacttatttacactattagagaggaattgcctgaaaatgtgcccataggaaacataccaaaggatctgaacatttctcacatcaatgctgccacagggaccagcgccagccttgtctacagactggtttctaaagctggggatgcccctttggtgaaagtatccagcagcactggggaaattttcacaacctccaacagaatagacagagaaaaactctgtgctggcgcctcatatgctgaggagaatgagtgtttctttgaacttgaggtggtgatcctccccaatgatttcttcaggctgatcaaaataaaaataattgtcaaggataccaatgataatgcccccatgtttccatctcctgtcatcaatatttccattccagaaaacactttgatcaacagccgctttccaattccatcagcaacagatcctgacacaggcttcaatggtgtacagcattatgaattgttaaatgggcagagtgtttttggactggatatcgtggaaactccagagggagagaagtggccacaactgattgttcagcaaaacttggatagagaacagaaagatacctatgtgatgaaaatcaaagtagaggatggaggcactccacagaaatccagtacggccatactgcaggtcacagtaagtgatgtaaatgacaacaggccagtgtttaaagagggtcaagtggaggtgcatattccagagaatgctcccgtaggtacctctgtaattcagctccatgccactgatgcagatataggcagtaatgctgaaatccggtacatttttggtgcccaggtcgcccctgcaaccaaaagactctttgctttaaataatactactgggctgattacagttcagaggtccttagatagagaggagacagccattcacaaagtgacagtgctggctagtgacggcagctccactcctgctcgagcaacggttaccatcaatgtcaccgatgtaaatgataaccctcctaatatagacctcaggtacattataagtcccatcaatggcaccgtgtatttatctgagaaagatcctgtcaatacaaagattgccctaattacagtttcagataaggacacagatgtgaatggcaaagtgatctgttttattgaaagagaggtcccatttcatttgaaggcggtatatgacaaccaatatttgttagagacctcttctttgttggactatgagggcaccaaagaattcagctttaaaattgttgcctctgattctgggaagcccagtttaaatcagactgccctggtaagggttaagcttgaggatgaaaatgacaacccaccaattttcaaccagcctgtaattgagctgtcagtttctgaaaacaaccgacgtgggttatacttaacaactattagtgccacagatgaagacagtgggaaaaatgcagacattgtttatcagcttggaccgaatgcctccttctttgatctggaccgaaaaacaggagttttgacagcctccagagtatttgacagagaagaacaagaacgattcatttttacagtaactgccagggataatgggacccctcccctccaaagccaagcggctgtgattgttactgttctggatgagaatgacaatagccccaagtttactcataatcattttcaattttttgtgtctgagaatctgccaaagtatagtactgtgggggtaatcacagtgacagatgcagatgctggagagaataaagctgtgactctttccattctaaatgacaatgataattttgtgttggatccctattctggagtcataaagtcaaatgtctcatttgatagagagcagcagagttcctacacttttgatgtcaaagccactgatggaggacaaccacctcgttcctctactgcaaaagtaactatcaacgtcatggatgtcaatgacaacagcccagttgtcatttctccaccgtctaatacttcctttaagttggtgcccctctcagccattcctggctccgtggtagcagaagtttttgcagtggatgttgacactggaatgaacgctgaactaaagtatactatagtgagtggaaacaataaaggcttattccggattgatccagtaacaggtaacattactctggaagaaaaaccagcacctactgatgtgggattgcatcgtttggtggtcaacataagtgacctggggtaccctaagtctttgcacacgcttgtgcttgtattcctttatgttaacgacactgctggaaatgcctcctatatctatgacttgatccgcaggactatggagaccccgttggacaggaacataggggatagtagccaaccctatcaaaatgaggactatctaaccatcatgattgccatcatcgccggtgccatggtggtcattgttgtgatcttcgtcaccgttctggtgcgctgtcgccatgcatcaaggttcaaagcagctcagaggagcaagcaaggtgccgaatggatgtccccaaaccaggagaacaagcaaaacaagaaaaagaaaagaaagaaaaggaagtctcccaaaagctctcttttgaactttgttactatcgaagagtccaaacccgatgatgcagttcatgaacctatcaatgggacaataagcctgccggctgaactggaggagcaaagtataggaagatttgactggggcccggcacctccaacaacattcaagcctaacagtcctgacctggccaagcactacaaatctgcttctccacagcctgcttttcatctcaaaccagacactccagtttccgtgaaaaagcaccacgtgattcaggaactccctttggacaacacctttgttgggggttgtgacaccctttctaaacgctcttccactagttcagatcacttcagtgcctcagagtgcagttcccaaggaggcttcaagacaaagggccccttacacaccagacaggtaaacgagcacttttactggtctataagtactgcatacaagtgcccagtcaaccagtattaacgtgccagtatgtctattgttttggtctaactttagcttagttagaaagaggtaaaaaaaaacttgaccccttttctattcctctggggctcagtcaagaatttttagaacagctttgaaatttctgagttctgagaatattttctcctttcagtttccttcaaatggcaaaagatgaaaagagaaaattattccaaaatgtcccaagataatgtttgctgaagaagaaaaaacctgtcctgatatgccaaattctgctcctgggggtttccaaattgactgcttcaagactttcaccttaccttttgatctaaaaagtcaccttcaaatctcaagttttcaatgacttttgaaggtgtgactgcaattatgttgcagctatggttgctaaaggggttaattttttttttagtctctaaacaggatagtagaatattaaatgtacatcagctgtgaagcacatgatcgttgatagattgcaactaagccatataggaagtcttctctttgatttcaaattattttattgtaatatattaaattcgatacttaatagaaagatttttagtgtccgcagtggccaaatactctttcaaaaaaaaaaaaaaaagaatgcttgctgcctaatataactgatttaaaaagaaaagaatgaatccattgtaaatattctctcatcttagtaatgcataagtgatctgtcataactcattttaaactgtgaaatatgccatatgaagagggattaagaggctgagaaactcatatttcaaccaaatccagaattagtttttcttaggtctaataattccttgttaataaagatttaaatgcagcgctgtctaatttatttcactggtgcttgtctgttgccacaaaatttgaatatcgataatagcctgtagatggcactagggtatcatgtcgcttgtgctggccaggtgccaatcccgcagtagcaaggagaagggggagggaaggatcaagctggtagtacagccaaagataccttttatttaatgatagttgctctggagcaactagcatttaagttcattcgcttgctcttttgtgattagctctcagcacacca

SEQ ID NO: 157 - DNA, 4321 bp, Homo sapien
  misc_feature (4260)..(4260): n=a, c, g or t
cagagagaggagagggagaaggagagaggggcagaggggaagggagagagggagagcacgcgagacggaaaggagcgcctcagagtctctgaagcacgcaagagataaccgattaggaatttttcgggcaactgtcacccggatagctgtcagagaatcatcatcaccgcaactctgacgtttcctacaagaagttagagacttaagcagtattggcatcggatggaaatgggatgcatgctgctgtggaaaatatccctgagctgaagaagtgcaactatgtgttgtgtgtgctaaatgcccagaagaacccagacccagtgggtaagagagacgaaatgtggagagaatgactaacgacaaatccgtgaatttgttctctggagttgctaatttgccagcccgaagcaacacattttacaaggaggaaacattttgctgcttctgatttctccccaaactggtgctaccagatgcatggctttctatgtgttggaacaaatcattcctaactgcagcatactgggaaaggggaaaggttgaggcaactaaccggctgtctccaaataagtgatgagatataatgcatcctccagtccatgcacgcttcctcttgcaatttgtgcatcattcctcagtggaaacctttaaaccctaaaatccaggaaaagaaaataaatacattatcatggacctgagggatttttacctgttggctgctctgattgcctgtttaaggctggattccgcaatagctcaagaacttatttacactattagagaggaattgcctgaaaatgtgcccataggaaacataccaaaggatctgaacatttctcacatcaatgctgccacagggaccagcgccagccttgtctacagactggtttctaaagctggggatgcccctttggtgaaagtatccagcagcactggggaaattttcacaacctccaacagaatagacagagaaaaactctgtgctggcgcctcatatgctgaggagaatgagtgtttctttgaacttgaggtggtgatcctccccaatgatttcttcaggctgatcaaaataaaaataattgtcaaggataccaatgataatgcccccatgtttccatctcctgtcatcaatatttccattccagaaaacactttgatcaacagccgctttccaattccatcagcaacagatcctgacacaggcttcaatggtgtacagcattatgaattgttaaatgggcagagtgtttttggactggatatcgtggaaactccagagggagagaagtggccacaactgattgttcagcaaaacttggatagagaacagaaagatacctatgtgatgaaaatcaaagtagaggatggaggcactccacagaaatccagtacggccatactgcaggtcacagtaagtgatgtaaatgacaacaggccagtgtttaaagagggtcaagtggaggtgcatattccagagaatgctcccgtaggtacctctgtaattcagctccatgccactgatgcagatataggcagtaatgctgaaatccggtacatttttggtgcccaggtcgcccctgcaaccaaaagactctttgctttaaataatactactgggctgattacagttcagaggtccttagatagagaggagacagccattcacaaagtgacagtgctggctagtgacggcagctccactcctgctcgagcaacggttaccatcaatgtcaccgatgtaaatgataaccctcctaatatagacctcaggtacattataagtcccatcaatggcaccgtgtatttatctgagaaagatcctgtcaatacaaagattgccctaattacagtttcagataaggacacagatgtgaatggcaaagtgatctgttttattgaaagagaggtcccatttcatttgaaggcggtatatgacaaccaatatttgttagagacctcttctttgttggactatgagggcaccaaagaattcagctttaaaattgttgcctctgattctgggaagcccagtttaaatcagactgccctggtaagggttaagcttgaggatgaaaatgacaacccaccaattttcaaccagcctgtaattgagctgtcagtttctgaaaacaaccgacgtgggttatacttaacaactattagtgccacagatgaagacagtgggaaaaatgcagacattgtttatcagcttggaccgaatgcctccttctttgatctggaccgaaaaacaggagttttgacagcctccagagtatttgacagagaagaacaagaacgattcatttttacagtaactgccagggataatgggacccctcccctccaaagccaagcggctgtgattgttactgttctggatgagaatgacaatagccccaagtttactcataatcattttcaattttttgtgtctgagaatctgccaaagtatagtactgtgggggtaatcacagtgacagatgcagatgctggagagaataaagctgtgactctttccattctaaatgacaatgataattttgtgttggatccctattctggagtcataaagtcaaatgtctcatttgatagagagcagcagagttcctacacttttgatgtcaaagccactgatggaggacaaccacctcgttcctctactgcaaaagtaactatcaacgtcatggatgtcaatgacaacagcccagttgtcatttctccaccgtctaatacttcctttaagttggtgcccctctcagccattcctggctccgtggtagcagaagtttttgcagtggatgttgacactggaatgaacgctgaactaaagtatactatagtgagtggaaacaataaaggcttattccggattgatccagtaacaggtaacattactctggaagaaaaaccagcacctactgatgtgggattgcatcgtttggtggtcaacataagtgacctggggtaccctaagtctttgcacacgcttgtgcttgtattcctttatgttaacgacactgctggaaatgcctcctatatctatgacttgatccgcaggactatggagaccccgttggacaggaacataggggatagtagccaaccctatcaaaatgaggactatctaaccatcatgattgccatcatcgccggtgccatggtggtcattgttgtgatcttcgtcaccgttctggtgcgctgtcgccatgcatcaaggttcaaagcagctcagaggagcaagcaaggtgccgaatggatgtccccaaaccaggagaacaagcaaaacaagaaaaagaaaagaaagaaaaggaagtctcccaaaagctctcttttgaactttgttactatcgaagagtccaaacccgatgatgcagttcatgaacctatcaatgggacaataagcctgccggctgaactggaggagcaaagtataggaagatttgactggggcccggcacctccaacaacattcaagcctaacagtcctgacctggccaagcactacaaatctgcttctccacagcctgcttttcatctcaaaccagacactccagtttccgtgaaaaagcaccacgtgattcaggaactccctttggacaacacctttgttgggggttgtgacaccctttctaaacgctcttccactagttcagatcacttcagtgcctcagagtgcagttcccaaggaggcttcaagacaaagggccccttacacaccagacagtgtaactcacacagcaaaagtgacaatattcctgtcactcctcagaaatgtcccagctccacgggtttccacattcaggagaatgaagaaagccattacgagtcgcagcgccgtgttacgtttcatctccctgatggctcccaggaaagctgcagtgacagtggtctaggagaccatgagccggtgggtagtggaaccctgatctcacaccctcttcctctggttcagccacaggacgaattctatgaccaggcctctccggacaagaggactgaagcagatggcaactctgatcccaactctggtgagtccccttcaaaattttgattgcttggagttgttctggttttgtagtgcttggccaggtcaggactgttaggcttgaatgttgttggaggtgccgggccccagtcaaatcttcctatactttgctcctccagttcagccggcaggcttattgtcccattgataggttcatgaactgcatcatcgggtttggactcttcgatagtaacaaagttcaaaagagagctttngggagacttccttttctttcttttcttttttaatggttcataaaatgaagacacatcatac

SEQ ID NO: 158 - DNA, 907 bp, Homo sapien
caggtgggcctgcctgatctccttcgggcttcaactgctgatgcctcctcacccctcacacacccatctctgcactcatgtaaaactaatgtatcaaaattagcatatatggaagaaaaatcactattcaaaaatagtttcaattgggcaaatgtgtgtctacaactttgttgaaatggcagagtctgtgttgatcctcatatacaataatgttgttgtaacacaagtgttattagaccatagccacaaaatatttaatgtgttgtgccttcatgatgtaacagaacattctccaggtagggtagttgggggaaataaagggataaatctctaattattgctgtttaactgtttgttatcatagttggtcaatgcctggcaggtaccagcatattgtcacttaggtcaaaccaataaagtgacaactaatgttaataagatctcagttgcacgtgcaaacaaatccaaattcgaacattcttaggaggtttttgttaaggcatgacagatgatttaaacaaataaatagcatgcaacaaaatgtctttattgaaagaagtggaagttatcttaatgccacggttcaccatcaatttaaaagtaaaaaaaacaaaaaaaaaacaaaaaatttaaaaaaaaggtttgctaatctgatagttaatttgttcttaccaaaaaataaaattactttgtaaatagcagttcacatttttccacagtataatggaaaataatgggtaggggtgcattgcttattgaagtacatttttgtcggtttgtgaggggtgtttgatgactttgacagaataaatatctaaacaattatccttgttactgctttgccagttctacgttatttacaattattcagctcttgcaataaatgttctgaattcctgaaaaaaaa

SEQ ID NO: 159 - DNA, 1148 bp, Homo sapien
gtcgccagtcagtttcctctccgtggaaggctgagtcccaattccatagggctctgtgccagacttttagtctctgataactccgaaatccttccttctgtttcctaagctctacagtgtaactcacacagcaaaagtgacaatattcctgtcactcctcagaaatgtcccagctccacgggtttccacattcaggagaatgaagaaagccattacgagtcgcagcgccgtgttacgtttcatctccctgatggctcccaggaaagctgcagtgacagtggtctaggagaccatgagccggtgggtagtggaaccctgatctcacaccctcttcctctggttcagccacaggacgaattctatgaccaggcctctccggacaagaggactgaagcagatggcaactctgatcccaactctggtgagtccccttcaaaattttgattgcttggagttgttctggttttgtagtgcacttgagctttcaaaaataattgtagggggcaaggatgaacatttagttatttttttgctggctttattgttgttgctgtattctttgagatatacatttaatatgtttgatatgattttggctgttaaattgtatgatgtgtcttcattttatgaaccattaaaaaagaaaaaaacatgctataaatataactgaaagaagccatttgttgcaagatattctgatgtcagagatcttatgaaatttgaacacattttagaactgcaaaaatacagttaagtagaatagtcaatgaaaaaaagaaatctatttgcatatataaatgtcctatgaaatttgattttccagtgaacactttacaaaaacaaataaagaatattagagttaaaggtattttagaatttgtctatcagattttctggtttttaccagaaaatttaaaaaaaaaaggattaaatcatgattaaaacaagtgtgaagaggagagataacaatttgggggttgtttttcctttattgtctacttgaattcttggataatttgtttttttactactatgctgagggagatatatttggccaaaacttttattctccacagacccataccccactccagaaatcactgcccactccaaataagcattgttggggggtgttttccttggccttt

SEQ ID NO: 160 - DNA, 6224 bp, Homo sapien
cagagagaggagagggagaaggagagaggggcagaggggaagggagagagggagagcacgcgagacggaaaggagcgcctcagagtctctgaagcacgcaagagataaccgattaggaatttttcgggcaactgtcacccggatagctgtcagagaatcatcatcaccgcaactctgacgtttcctacaagaagttagagacttaagcagtattggcatcggatggaaatgggatgcatgctgctgtggaaaatatccctgagctgaagaagtgcaactatgtgttgtgtgtgctaaatgcccagaagaacccagacccagtgggtaagagagacgaaatgtggagagaatgactaacgacaaatccgtgaatttgttctctggagttgctaatttgccagcccgaagcaacacattttacaaggaggaaacattttgctgcttctgatttctccccaaactggtgctaccagatgcatggctttctatgtgttggaacaaatcattcctaactgcagcatactgggaaaggggaaaggttgaggcaactaaccggctgtctccaaataagtgatgagatataatgcatcctccagtccatgcacgcttcctcttgcaatttgtgcatcattcctcagtggaaacctttaaaccctaaaatccaggaaaagaaaataaatacattatcatggacctgagggatttttacctgttggctgctctgattgcctgtttaaggctggattccgcaatagctcaagaacttatttacactattagagaggaattgcctgaaaatgtgcccataggaaacataccaaaggatctgaacatttctcacatcaatgctgccacagggaccagcgccagccttgtctacagactggtttctaaagctggggatgcccctttggtgaaagtatccagcagcactggggaaattttcacaacctccaacagaatagacagagaaaaactctgtgctggcgcctcatatgctgaggagaatgagtgtttctttgaacttgaggtggtgatcctccccaatgatttcttcaggctgatcaaaataaaaataattgtcaaggataccaatgataatgcccccatgtttccatctcctgtcatcaatatttccattccagaaaacactttgatcaacagccgctttccaattccatcagcaacagatcctgacacaggcttcaatggtgtacagcattatgaattgttaaatgggcagagtgtttttggactggatatcgtggaaactccagagggagagaagtggccacaactgattgttcagcaaaacttggatagagaacagaaagatacctatgtgatgaaaatcaaagtagaggatggaggcactccacagaaatccagtacggccatactgcaggtcacagtaagtgatgtaaatgacaacaggccagtgtttaaagagggtcaagtggaggtgcatattccagagaatgctcccgtaggtacctctgtaattcagctccatgccactgatgcagatataggcagtaatgctgaaatccggtacatttttggtgcccaggtcgcccctgcaaccaaaagactctttgctttaaataatactactgggctgattacagttcagaggtccttagatagagaggagacagccattcacaaagtgacagtgctggctagtgacggcagctccactcctgctcgagcaacggttaccatcaatgtcaccgatgtaaatgataaccctcctaatatagacctcaggtacattataagtcccatcaatggcaccgtgtatttatctgagaaagatcctgtcaatacaaagattgccctaattacagtttcagataaggacacagatgtgaatggcaaagtgatctgttttattgaaagagaggtcccatttcatttgaaggcggtatatgacaaccaatatttgttagagacctcttctttgttggactatgagggcaccaaagaattcagctttaaaattgttgcctctgattctgggaagcccagtttaaatcagactgccctggtaagggttaagcttgaggatgaaaatgacaacccaccaattttcaaccagcctgtaattgagctgtcagtttctgaaaacaaccgacgtgggttatacttaacaactattagtgccacagatgaagacagtgggaaaaatgcagacattgtttatcagcttggaccgaatgcctccttctttgatctggaccgaaaaacaggagttttgacagcctccagagtatttgacagagaagaacaagaacgattcatttttacagtaactgccagggataatgggacccctcccctccaaagccaagcggctgtgattgttactgttctggatgagaatgacaatagccccaagtttactcataatcattttcaattttttgtgtctgagaatctgccaaagtatagtactgtgggggtaatcacagtgacagatgcagatgctggagagaataaagctgtgactctttccattctaaatgacaatgataattttgtgttggatccctattctggagtcataaagtcaaatgtctcatttgatagagagcagcagagttcctacacttttgatgtcaaagccactgatggaggacaaccacctcgttcctctactgcaaaagtaactatcaacgtcatggatgtcaatgacaacagcccagttgtcatttctccaccgtctaatacttcctttaagttggtgcccctctcagccattcctggctccgtggtagcagaagtttttgcagtggatgttgacactggaatgaacgctgaactaaagtatactatagtgagtggaaacaataaaggcttattccggattgatccagtaacaggtaacattactctggaagaaaaaccagcacctactgatgtgggattgcatcgtttggtggtcaacataagtgacctggggtaccctaagtctttgcacacgcttgtgcttgtattcctttatgttaacgacactgctggaaatgcctcctatatctatgacttgatccgcaggactatggagaccccgttggacaggaacataggggatagtagccaaccctatcaaaatgaggactatctaaccatcatgattgccatcatcgccggtgccatggtggtcattgttgtgatcttcgtcaccgttctggtgcgctgtcgccatgcatcaaggttcaaagcagctcagaggagcaagcaaggtgccgaatggatgtccccaaaccaggagaacaagcaaaacaagaaaaagaaaagaaagaaaaggaagtctcccaaaagctctcttttgaactttgttactatcgaagagtccaaacccgatgatgcagttcatgaacctatcaatgggacaataagcctgccggctgaactggaggagcaaagtataggaagatttgactggggcccggcacctccaacaacattcaagcctaacagtcctgacctggccaagcactacaaatctgcttctccacagcctgcttttcatctcaaaccagacactccagtttccgtgaaaaagcaccacgtgattcaggaactccctttggacaacacctttgttgggggttgtgacaccctttctaaacgctcttccactagttcagatcacttcagtgcctcagagtgcagttcccaaggaggcttcaagacaaagggccccttacacaccagacagtgtaactcacacagcaaaagtgacaatattcctgtcactcctcagaaatgtcccagctccacgggtttccacattcaggagaatgaagaaagccattacgagtcgcagcgccgtgttacgtttcatctccctgatggctcccaggaaagctgcagtgacagtggtctaggagaccatgagccggtgggtagtggaaccctgatctcacaccctcttcctctggttcagccacaggacgaattctatgaccaggcctctccggacaagaggactgaagcagatggcaactctgatcccaactctgatgggcctttgggtccccgaggattagctgaagctacagagatgtgcactcaagagtgcttggttttgggtcactctgataattgctggatgcctcctggcttgggtccatatcaacaccccaaatctcctctctcaacctttgcaccccagaaagaatgggtgaagaaggacaagcttgtgaatgggcacaccctgaccagagcctggaaagaagacagcaacaggaaccagttcaatgaccgtaagcagtatggctccaatgaaggccatttcaacaatggcagccacatgacagacattcctctggcaaatctgaagtcttataagcaagcaggaggtgctactgagagtcctaaggagcaccaactctaagaaaaggctatatgggacctaataactttaaatagacatgctaataccgtgtgcgtcagagctttatgtattcaatagatctctacaactatgccccttctagcagggatacctataactttgtgttagcaccatggagaatacaatgtttttgcaacatatgagagaagatagttctagccatgcaattttgtttactagaattgattacactctccagagatctctccattgtgcaaattttttttattattgcattttattttgaccctggactgctgctatgaacaatagaatatgcatttggaaagtaagaaagtttcatggattagagtgactgaaaaacatatccagttagaaaattgtgcttttttttttttttttttttgtcattgatttgtgctgggactgctatacttgacattatactgcaaacaaaacttaaagagataagcattaaacctattgtgctgttaacaacgttagtggacacttgtaagtcaatcagtgttaaagtatttgtaaatagaagcaagctattattaacaacttttgtgtacttataatgttcacctaaaaatgttgtagcataattctgtgttttatggttgcttctgtccttctttttatttacctctttgttgttatttttgttgtttctttcagtgaggtgtttctgtgttagtagtctgtcttgacacacattgttcaaacaatctcaagcacttgtgtttaaaaaaggttctgaaatcttgcttctcatatgatagcttatgatgccggaattctgtaaacaataaagatgaaagaaaaaatgaaaactttatacaaaaaaggacttctgcaaaagcttggaaattcagaacctattttttatcatcttattttcaaagtaggcaaaagcaaaatcacttaattagtaccattaagtgagagagtaatggaaaactgttatccatcaaaagtgatataatatcctgtacttgtcactcatgtaaaactaatgtatcaaaattagcatatatggaagaaaaatcactattcaaaaatagtttcaattgggcaaatgtgtgtctacaactttgttgaaatggcagagtctgtgttgatcctcatatacaataatgttgttgtaacacaagtgttattagaccatagccacaaaatatttaatgtgttgtgccttcatgatgtaacagaacattctccaggtagggtagttgggggaaataaagggataaatctctaattattgctgtttaactgtttgttatcatagttggtcaatgcctggcaggtaccagcatattgtcacttaggtcaaaccaataaagtgacaactaatgttaataagatctcagttgcacgtgcaaacaaatccaaattcgaacattcttaggaggtttttgttaaggcatgacagatgatttaaacaaataaatagcatgcaacaaaatgtctttattgaaagaagtggaagttatcttaatgccacggttcaccatcaatttaaaagtaaaaaaaacaaaaaaaaaacaaaaaatttaaaaaaaaggtttgctaatctgatagttaatttgttcttaccaaaaaataaaattactttgtaaatagcagttcacatttttccacagtataatggaaaataatgggtaggggtgcattgcttattgaagtacatttttgtcggtttgtgaggggtgtttgatgactttgacagaataaatatctaaacaattatccttgttactgctttgccagttctacgttatttacaattattcagctcttgcaataaatgttctgaattcctgaaaaaaaa

SEQ ID NO: 161 - DNA, 6053 bp, Homo sapien
cagagagaggagagggagaaggagagaggggcagaggggaagggagagagggagagcacgcgagacggaaaggagcgcctcagagtctctgaagcacgcaagagataaccgattaggaatttttcgggcaactgtcacccggatagctgtcagagaatcatcatcaccgcaactctgacgtttcctacaagaagttagagacttaagcagtattggcatcggatggaaatgggatgcatgctgctgtggaaaatatccctgagctgaagaagtgcaactatgtgttgtgtgtgctaaatgcccagaagaacccagacccagtgggtaagagagacgaaatgtggagagaatgactaacgacaaatccgtgaatttgttctctggagttgctaatttgccagcccgaagcaacacattttacaaggaggaaacattttgctgcttctgatttctccccaaactggtgctaccagatgcatggctttctatgtgttggaacaaatcattcctaactgcagcatactgggaaaggggaaaggttgaggcaactaaccggctgtctccaaataagtgatgagatataatgcatcctccagtccatgcacgcttcctcttgcaatttgtgcatcattcctcagtggaaacctttaaaccctaaaatccaggaaaagaaaataaatacattatcatggacctgagggatttttacctgttggctgctctgattgcctgtttaaggctggattccgcaatagctcaagaacttatttacactattagagaggaattgcctgaaaatgtgcccataggaaacataccaaaggatctgaacatttctcacatcaatgctgccacagggaccagcgccagccttgtctacagactggtttctaaagctggggatgcccctttggtgaaagtatccagcagcactggggaaattttcacaacctccaacagaatagacagagaaaaactctgtgctggcgcctcatatgctgaggagaatgagtgtttctttgaacttgaggtggtgatcctccccaatgatttcttcaggctgatcaaaataaaaataattgtcaaggataccaatgataatgcccccatgtttccatctcctgtcatcaatatttccattccagaaaacactttgatcaacagccgctttccaattccatcagcaacagatcctgacacaggcttcaatggtgtacagcattatgaattgttaaatgggcagagtgtttttggactggatatcgtggaaactccagagggagagaagtggccacaactgattgttcagcaaaacttggatagagaacagaaagatacctatgtgatgaaaatcaaagtagaggatggaggcactccacagaaatccagtacggccatactgcaggtcacagtaagtgatgtaaatgacaacaggccagtgtttaaagagggtcaagtggaggtgcatattccagagaatgctcccgtaggtacctctgtaattcagctccatgccactgatgcagatataggcagtaatgctgaaatccggtacatttttggtgcccaggtcgcccctgcaaccaaaagactctttgctttaaataatactactgggctgattacagttcagaggtccttagatagagaggagacagccattcacaaagtgacagtgctggctagtgacggcagctccactcctgctcgagcaacggttaccatcaatgtcaccgatgtaaatgataaccctcctaatatagacctcaggtacattataagtcccatcaatggcaccgtgtatttatctgagaaagatcctgtcaatacaaagattgccctaattacagtttcagataaggacacagatgtgaatggcaaagtgatctgttttattgaaagagaggtcccatttcatttgaaggcggtatatgacaaccaatatttgttagagacctcttctttgttggactatgagggcaccaaagaattcagctttaaaattgttgcctctgattctgggaagcccagtttaaatcagactgccctggtaagggttaagcttgaggatgaaaatgacaacccaccaattttcaaccagcctgtaattgagctgtcagtttctgaaaacaaccgacgtgggttatacttaacaactattagtgccacagatgaagacagtgggaaaaatgcagacattgtttatcagcttggaccgaatgcctccttctttgatctggaccgaaaaacaggagttttgacagcctccagagtatttgacagagaagaacaagaacgattcatttttacagtaactgccagggataatgggacccctcccctccaaagccaagcggctgtgattgttactgttctggatgagaatgacaatagccccaagtttactcataatcattttcaattttttgtgtctgagaatctgccaaagtatagtactgtgggggtaatcacagtgacagatgcagatgctggagagaataaagctgtgactctttccattctaaatgacaatgataattttgtgttggatccctattctggagtcataaagtcaaatgtctcatttgatagagagcagcagagttcctacacttttgatgtcaaagccactgatggaggacaaccacctcgttcctctactgcaaaagtaactatcaacgtcatggatgtcaatgacaacagcccagttgtcatttctccaccgtctaatacttcctttaagttggtgcccctctcagccattcctggctccgtggtagcagaagtttttgcagtggatgttgacactggaatgaacgctgaactaaagtatactatagtgagtggaaacaataaaggcttattccggattgatccagtaacaggtaacattactctggaagaaaaaccagcacctactgatgtgggattgcatcgtttggtggtcaacataagtgacctggggtaccctaagtctttgcacacgcttgtgcttgtattcctttatgttaacgacactgctggaaatgcctcctatatctatgacttgatccgcaggactatggagaccccgttggacaggaacataggggatagtagccaaccctatcaaaatgaggactatctaaccatcatgattgccatcatcgccggtgccatggtggtcattgttgtgatcttcgtcaccgttctggtgcgctgtcgccatgcatcaaggttcaaagcagctcagaggagcaagcaaggtgccgaatggatgtccccaaaccaggagaacaagcaaaacaagaaaaagaaaagaaagaaaaggaagtctcccaaaagctctcttttgaactttgttactatcgaagagtccaaacccgatgatgcagttcatgaacctatcaatgggacaataagcctgccggctgaactggaggagcaaagtataggaagatttgactggggcccggcacctccaacaacattcaagcctaacagtcctgacctggccaagcactacaaatctgcttctccacagcctgcttttcatctcaaaccagacactccagtttccgtgaaaaagcaccacgtgattcaggaactccctttggacaacacctttgttgggggttgtgacaccctttctaaacgctcttccactagttcagatcacttcagtgcctcagagtgcagttcccaaggaggcttcaagacaaagggccccttacacaccagacagaaatgtcccagctccacgggtttccacattcaggagaatgaagaaagccattacgagccacaggacgaattctatgaccaggcctctccggacaagaggactgaagcagatggcaactctgatcccaactctgatgggcctttgggtccccgaggattagctgaagctacagagatgtgcactcaagagtgcttggttttgggtcactctgataattgctggatgcctcctggcttgggtccatatcaacaccccaaatctcctctctcaacctttgcaccccagaaagaatgggtgaagaaggacaagcttgtgaatgggcacaccctgaccagagcctggaaagaagacagcaacaggaaccagttcaatgaccgtaagcagtatggctccaatgaaggccatttcaacaatggcagccacatgacagacattcctctggcaaatctgaagtcttataagcaagcaggaggtgctactgagagtcctaaggagcaccaactctaagaaaaggctatatgggacctaataactttaaatagacatgctaataccgtgtgcgtcagagctttatgtattcaatagatctctacaactatgccccttctagcagggatacctataactttgtgttagcaccatggagaatacaatgtttttgcaacatatgagagaagatagttctagccatgcaattttgtttactagaattgattacactctccagagatctctccattgtgcaaattttttttattattgcattttattttgaccctggactgctgctatgaacaatagaatatgcatttggaaagtaagaaagtttcatggattagagtgactgaaaaacatatccagttagaaaattgtgcttttttttttttttttttttgtcattgatttgtgctgggactgctatacttgacattatactgcaaacaaaacttaaagagataagcattaaacctattgtgctgttaacaacgttagtggacacttgtaagtcaatcagtgttaaagtatttgtaaatagaagcaagctattattaacaacttttgtgtacttataatgttcacctaaaaatgttgtagcataattctgtgttttatggttgcttctgtccttctttttatttacctctttgttgttatttttgttgtttctttcagtgaggtgtttctgtgttagtagtctgtcttgacacacattgttcaaacaatctcaagcacttgtgtttaaaaaaggttctgaaatcttgcttctcatatgatagcttatgatgccggaattctgtaaacaataaagatgaaagaaaaaatgaaaactttatacaaaaaaggacttctgcaaaagcttggaaattcagaacctattttttatcatcttattttcaaagtaggcaaaagcaaaatcacttaattagtaccattaagtgagagagtaatggaaaactgttatccatcaaaagtgatataatatcctgtacttgtcactcatgtaaaactaatgtatcaaaattagcatatatggaagaaaaatcactattcaaaaatagtttcaattgggcaaatgtgtgtctacaactttgttgaaatggcagagtctgtgttgatcctcatatacaataatgttgttgtaacacaagtgttattagaccatagccacaaaatatttaatgtgttgtgccttcatgatgtaacagaacattctccaggtagggtagttgggggaaataaagggataaatctctaattattgctgtttaactgtttgttatcatagttggtcaatgcctggcaggtaccagcatattgtcacttaggtcaaaccaataaagtgacaactaatgttaataagatctcagttgcacgtgcaaacaaatccaaattcgaacattcttaggaggtttttgttaaggcatgacagatgatttaaacaaataaatagcatgcaacaaaatgtctttattgaaagaagtggaagttatcttaatgccacggttcaccatcaatttaaaagtaaaaaaaacaaaaaaaaaacaaaaaatttaaaaaaaaggtttgctaatctgatagttaatttgttcttaccaaaaaataaaattactttgtaaatagcagttcacatttttccacagtataatggaaaataatgggtaggggtgcattgcttattgaagtacatttttgtcggtttgtgaggggtgtttgatgactttgacagaataaatatctaaacaattatccttgttactgctttgccagttctacgttatttacaattattcagctcttgcaataaatgttctgaattcctgaaaaaaaa

SEQ ID NO: 162 - DNA, 4755 bp, Homo sapien
cagagagaggagagggagaaggagagaggggcagaggggaagggagagagggagagcacgcgagacggaaaggagcgcctcagagtctctgaagcacgcaagagataaccgattaggaatttttcgggcaactgtcacccggatagctgtcagagaatcatcatcaccgcaactctgacgtttcctacaagaagttagagacttaagcagtattggcatcggatggaaatgggatgcatgctgctgtggaaaatatccctgagctgaagaagtgcaactatgtgttgtgtgtgctaaatgcccagaagaacccagacccagtgggtaagagagacgaaatgtggagagaatgactaacgacaaatccgtgaatttgttctctggagttgctaatttgccagcccgaagcaacacattttacaaggaggaaacattttgctgcttctgatttctccccaaactggtgctaccagatgcatggctttctatgtgttggaacaaatcattcctaactgcagcatactgggaaaggggaaaggttgaggcaactaaccggctgtctccaaataagtgatgagatataatgcatcctccagtccatgcacgcttcctcttgcaatttgtgcatcattcctcagtggaaacctttaaaccctaaaatccaggaaaagaaaataaatacattatcatggacctgagggatttttacctgttggctgctctgattgcctgtttaaggctggattccgcaatagctcaagaacttatttacactattagagaggaattgcctgaaaatgtgcccataggaaacataccaaaggatctgaacatttctcacatcaatgctgccacagggaccagcgccagccttgtctacagactggtttctaaagctggggatgcccctttggtgaaagtatccagcagcactggggaaattttcacaacctccaacagaatagacagagaaaaactctgtgctggcgcctcatatgctgaggagaatgagtgtttctttgaacttgaggtggtgatcctccccaatgatttcttcaggctgatcaaaataaaaataattgtcaaggataccaatgataatgcccccatgtttccatctcctgtcatcaatatttccattccagaaaacactttgatcaacagccgctttccaattccatcagcaacagatcctgacacaggcttcaatggtgtacagcattatgaattgttaaatgggcagagtgtttttggactggatatcgtggaaactccagagggagagaagtggccacaactgattgttcagcaaaacttggatagagaacagaaagatacctatgtgatgaaaatcaaagtagaggatggaggcactccacagaaatccagtacggccatactgcaggtcacagtaagtgatgtaaatgacaacaggccagtgtttaaagagggtcaagtggaggtgcatattccagagaatgctcccgtaggtacctctgtaattcagctccatgccactgatgcagatataggcagtaatgctgaaatccggtacatttttggtgcccaggtcgcccctgcaaccaaaagactctttgctttaaataatactactgggctgattacagttcagaggtccttagatagagaggagacagccattcacaaagtgacagtgctggctagtgacggcagctccactcctgctcgagcaacggttaccatcaatgtcaccgatgtaaatgataaccctcctaatatagacctcaggtacattataagtcccatcaatggcaccgtgtatttatctgagaaagatcctgtcaatacaaagattgccctaattacagtttcagataaggacacagatgtgaatggcaaagtgatctgttttattgaaagagaggtcccatttcatttgaaggcggtatatgacaaccaatatttgttagagacctcttctttgttggactatgagggcaccaaagaattcagctttaaaattgttgcctctgattctgggaagcccagtttaaatcagactgccctggtaagggttaagcttgaggatgaaaatgacaacccaccaattttcaaccagcctgtaattgagctgtcagtttctgaaaacaaccgacgtgggttatacttaacaactattagtgccacagatgaagacagtgggaaaaatgcagacattgtttatcagcttggaccgaatgcctccttctttgatctggaccgaaaaacaggagttttgacagcctccagagtatttgacagagaagaacaagaacgattcatttttacagtaactgccagggataatgggacccctcccctccaaagccaagcggctgtgattgttactgttctggatgagaatgacaatagccccaagtttactcataatcattttcaattttttgtgtctgagaatctgccaaagtatagtactgtgggggtaatcacagtgacagatgcagatgctggagagaataaagctgtgactctttccattctaaatgacaatgataattttgtgttggatccctattctggagtcataaagtcaaatgtctcatttgatagagagcagcagagttcctacacttttgatgtcaaagccactgatggaggacaaccacctcgttcctctactgcaaaagtaactatcaacgtcatggatgtcaatgacaacagcccagttgtcatttctccaccgtctaatacttcctttaagttggtgcccctctcagccattcctggctccgtggtagcagaagtttttgcagtggatgttgacactggaatgaacgctgaactaaagtatactatagtgagtggaaacaataaaggcttattccggattgatccagtaacaggtaacattactctggaagaaaaaccagcacctactgatgtgggattgcatcgtttggtggtcaacataagtgacctggggtaccctaagtctttgcacacgcttgtgcttgtattcctttatgttaacgacactgctggaaatgcctcctatatctatgacttgatccgcaggactatggagaccccgttggacaggaacataggggatagtagccaaccctatcaaaatgaggactatctaaccatcatgattgccatcatcgccggtgccatggtggtcattgttgtgatcttcgtcaccgttctggtgcgctgtcgccatgcatcaaggttcaaagcagctcagaggagcaagcaaggtgccgaatggatgtccccaaaccaggagaacaagcaaaacaagaaaaagaaaagaaagaaaaggaagtctcccaaaagctctcttttgaactttgttactatcgaagagtccaaacccgatgatgcagttcatgaacctatcaatgggacaataagcctgccggctgaactggaggagcaaagtataggaagatttgactggggcccggcacctccaacaacattcaagcctaacagtcctgacctggccaagcactacaaatctgcttctccacagcctgcttttcatctcaaaccagacactccagtttccgtgaaaaagcaccacgtgattcaggaactccctttggacaacacctttgttgggggttgtgacaccctttctaaacgctcttccactagttcagatcacttcagtgcctcagagtgcagttcccaaggaggcttcaagacaaagggccccttacacaccagacagtgtaactcacacagcaaaagtgacaatattcctgtcactcctcagaaatgtcccagctccacgggtttccacattcaggagaatgaagaaagccattacgagtcgcagcgccgtgttacgtttcatctccctgatggctcccaggaaagctgcagtgacagtggtctaggagaccatgagccggtgggtagtggaaccctgatctcacaccctcttcctctggttcagccacaggacgaattctatgaccaggcctctccggacaagaggactgaagcagatggcaactctgatcccaactctggtgagtccccttcaaaattttgattgcttggagttgttctggttttgtagtgcacttgagctttcaaaaataattgtagggggcaaggatgaacatttagttatttttttgctggctttattgttgttgctgtattctttgagatatacatttaatatgtttgatatgattttggctgttaaattgtatgatgtgtcttcattttatgaaccattaaaaaagaaaaaaacatgctataaatataactgaaagaagccatttgttgcaagatattctgatgtcagagatcttatgaaatttgaacacattttagaactgcaaaaatacagttaagtagaatagtcaatgaaaaaaagaaatctatttgcatatataaatgtcctatgaaatttgattttccagtgaacactttacaaaaacaaataaagaatattagagttaaaggtattttagaatttgtctatcagattttctggtttttaccagaaaatttaaaaaaaaaaggattaaatcatgattaaaacaagtgtgaagaggagagataacaatttgggggttgtttttcctttattgtctacttgaattcttggataatttgtttttttactactatgctgagggagatatatttggccaaaacttttattctccacagacccataccccactccagaaatcactgcccactccaaataagcattgttggggggtgttttccttggccttt

SEQ ID NO: 163 - DNA, 1302 bp, Homo sapien
  misc_feature (962)..(1000): n=a, c, g or t
gctgctgaattggactgttatatctttgtaagaagttctgttgggcagagctgctctgaagttttgaactttcaacagagtgaattatggcaaggcagatttcagcccatttctaacaaaactgttctattaattttaactgttcagtgccagtgctgttgaactggctgcctcaaagaatagtaagctttctgtcatttgaagtactcagacagagactagattcctactttttggagtgatgtagaagagtttcctacccagaaccttagggtgtttaagtgggaagaagactcagcaattcaatgtttcttttactgcagatgaagacacagactcagagtcagacagttttgcccaaagacccacaactggttaatggcaaatgctagctgtcctcatgaatcctagcttagtacttttcccattccacccattggctaatgttttaacaacaaggtcctcgcggttcttgttgagcaacacatttccgcttctggcattcaccagcttttccacttattctctcccactcttctgcagtgaaaactacactgcagccaagctgaactggctatattgaaatacgttattctgattcctgcctctgcgtctttgctattgctttgccctttatcaaagtgacatttcttcacaaacttaattctacttattttctaacttctcctcaggtctcagaatattcaaacccataccatctcttctctttgctaaactaccttgttacaatgcactcagacatttatactctctgtgatgattatattttgtcttatccctttcgatgagcttcttaaagactgtgattactattttcatgcatatatcctttttctgtctccctcactagaatataagttcctcaagggcaggcactatagctgtctttttcgccataccttactatccagttgctatccagcaagtgtcttagcaccatnnnnnnnnnnnnnnnnnnnnnnnnnnnnnnnnnnnnnnnatttttctcttcccaagcatgctattattctccttaagtttgccatgaattctcaataaatacttttctaagcaaacatttctgtttctataaagtaagtattgaaaataggaatatgaaaaaaacaaagtaaggcactccagcatgtaaagtgcttgggagtcctcactcccttccaaacctgagcaagtaaaacttggtaagttttcctggaactgtcagcaatctcagggcaaatcacttgccaccccaaaatcttgaaggaaattaggtacattcagacagtcacagttaaggttttg

SEQ ID NO: 164 - DNA, 1887 bp, Homo sapien
ggggttgttttagagctaggtggtccaccactgtagccactggtcacatgtgactatttaaatgaaaattaaataaaataaadrattcagctttccactcatagtaggcacatttcaagtgctcagtggtcacatggctgctgaattggactgttatatctttgtaagaagttctgttgggcagagctgctctgaagttttgaactttcaacagagtgaattatggcaaggcagatttcagcccatttctaacaaaactgttctattaattttaactgttcagtgccagtgctgttgaactggctgcctcaaagaatagtaagctttctgtcatttgaagtactcagacagagactagattcctactttttggagtgatgtagaagagtttcctacccagaaccttagggtgtttaagtgggaagaagactcagcaattcaatgtttcttttactgcagatgaagacacagactcagagtcagacagttttgcccaaagacccacaactggttaatggcaaatgctagctgtcctcatgaatcctagcttagtacttttcccattccacccattggctaatgttttaacaacaaggtcctcgcggttcttgttgagcaacacatttccgcttctggcattcaccagcttttccacttattctctcccactcttctgcagtgaaaactacactgcagccaagctgaactggctatattgaaatacgttattctgattcctgcctctgcgtctttgctattgctttgccctttatcaaagtgacatttcttcacaaacttaattctacttattttctaacttctcctcaggtctcagaatattcaaacccataccatctcttctctttgctaaactaccttgttacaatgcactcagacatttatactctctgtgatgattatattttgtcttatccctttcgatgagcttcttaaagactgtgattactattttcatgcatatatcctttttctgtctccctcactagaatataagttcctcaagggcaggcactatagctgtctttttcgccataccttactatccagttgctatccagcaagtgtcttagcaccataataggtgctcaacaaatatttattgaatgagtgaatcaatttttctcttcccaagcatgctattattctccttaagtttgccatgaattctcaataaatacttttctaagcaaacatttctgtttctataaagtaagtattgaaaataggaatatgaaaaaaacaaagtaaggcactccagcatgtaaagtgcttgggagtcctcactcccttccaaacctgagcaagtaaaacttggtaagttttcctggaactgtcagcaatctcagggcaaatcacttgccaccccaaaatcttgaaggaaattaggtacattcagacagtcacagttaaggtttgcttacctacagcagaagcaactggaaccatagactagaagggccatttaaatagtaattttgatgaattgctggaggctaagtgttsactagcttgagagtggaactcctaggcgcaggagtctgagaaaggctctcacacgtacatggattttacctcccggaaacccgtcaggttttcacagcaaagagccaagatagaccctgtcctggctctggcaaagggaaggggaaagtaatgactttgaagtgcgctcagaatgttctctatgataaasacttactctccaaggaaaagggctttaccagagtcttatcccatctggggagaagatagttctctsactcgaggcacctctagattcctgtgtcaactaaggaaggagsaaaaaggttaagaaacatttgtaaaggtcacagtacagcaacataggcccmccaaaagattgag

SEQ ID NO: 165 - DNA, 855 bp, Homo sapien
tcacgtgccaccccttatctgaagaaataggtacattcagacagtcacagctaagatttgcttacctacagcagaagcaactggtaccatagactagaagggccatttacatagtaattttgatgcattgctggaggctaagtgttgactagcttgagagtggaactcctaggcgcaggagtctgagaaagggtctcacacgtacatggattttacctcccggaaacccgtcaggttttcacagcaaagagccaagatagaccctgtcctggctctggcaaagggaaggggaaagtaatgactttgaagtgcgctcagaatgttctctatgataaagacttactctccaaggaaaagggctttaccagagtcttatcccatctggggagaagatagttctctgactcgaggcacctctagattcctgtgtcaactaaggaaggaggaaaaaggttaagaaacatttgtaaaggtcacagtacagcaacataggcccaccaaaagattgagatgtaatcctaagaaaatggaatgcttcccttccccactccttaccaccacagcaacagggctccttataataacagtggattacagctgaaagagctgcaagatgcagacagacaccggctggccaaggagagggggtctcaggaaagtccaaagacaacaggagagatgaaaaaaaaaaaaaagacactagaggactttgaaacctctgacaaccacatttatagcaaacattatatacaacccaatcttagacagataagcctcaagctgaagtcctttttgcctcatttcctgttatctgatacatcatgtctagctttcaacagaaaattacacagatga

SEQ ID NO: 166 - DNA, 2983 bp, Homo sapien
gaaaaaagggaaaaaataaccattttcctgtcaaaagagaaaaaagttaaagaaaaaaacctaccccaaacccctgaataacctacataatgtgggttttttttgtttgtattaaggagtgtttttaatatttaaaaaatacttttcaacaatggttctactgaaaaaataacagttttacatgacatatagatttataaaaattacatgttactgtgtttatagaaaaaaatggtggctgtgttttaaaaagacattgaagcaactcttgtgtgaaaatacacaggtggtgttgaaatagaaacaagcctaggcactagggttcctaaggtctgctttcatctcagcctctcatttgttatgttacatttcagggctatcattaatactgccattgtatcccatttttctttcatcttctcttttcaccccggaccctgtttgggggccaggagttcctttgagaatgtgaaggcggccctaaaagctctcctctaaataatgtgcaaatacacaacagatttgcatgtaagtttaggggtttcatggtttctggaaagcatctttggaccttagctgagtgtgcatgaattagaatgcattagtaagaacatggggctgcaaaatataccatatgaacaatagttagagcatttcactgtgatgagctagaaaaagaaaagcttgaggacaggtcgttaatgaactgtcacacatatctgaagagctgttatgtggaaggaagaagtttatttggggttgttttagagctaggtggtccaccactgtagccactggtcacatgtgactatttaaatgaaaattaaataaaataaaaaattcagctttccactcatagtaggcacatttcaagtgctcagtggtcacatggctgctgaattggactgttatatctttgtaagaagttctgttgggcagagctgctctgaagttttgaactttcaacagagtgaattatggcaaggcagatttcagctcatttctaacaaaactgttctattaattttaactgttcagtgccagagctgttgaactggctgcctcaaagaatagtaagctttctgtcatttgaagtactcagacagagactagattcctactttttggagtgatgtagaagagtttcctacccagaaccttagggtgtttaagtgggaagaagactcagcaattcaatgtttcttttactgcagatgaagacacagactcagagtcagacagttttgcccaaagacccacaactggttaatggcaaatgctagctgtcctcatgaatcctagcttagtacttttcccattccacccattggctaatgttttaacaacaaggtcctcgcggttcttgttgagcaacacatttccgcttctggcattcaccagcttttccacttattctctcccactcttctgcagtgaaaactacactgcagccaagctgaactggctatattgaaatacgttattctgattcctgcctctgcgtctttgctattgctttgccctttatcaaagtgacatttcttcacaaacttaattctacttattttctaacttctcctcaggtctcagaatattcaaacccataccatctcttctctttgctaaactaccttgttacaatgcactcagacatttatactctctgtgatgattatattttgtcttatccctttgatgagcttcttaaagactgtgattactattttcatgcatatatcctttttctgtctccctcactagaatataagttcctcaagggcagggactatagctgtctttttcgccataccttactatccagttgctatccagcaagtgtcttagcaccataataggtgctcaacaaatatttattgaatgagtgaatcaatttttctcttcccaagcatgctattattctccttaagtttgccatgaattctcaataaatacttttctaagcaaacatttctgtttctataaagtaagtattgaaaataggaatatgaaaaaaacaaagtaaggcactccagcatgtaaagtgcttgggagtcctcactcccttccaaacctgagcaagtaaaacttggtaagttttcctggaactgtcagcaatctcagggcaaatcacttgccaccccaaaatctgaagaaataggtacattcagacagtcacagctaagatttgcttacctacagcagaagcaactggaaccatagactagaagggccatttaaatagtaattttgatgaattgctggaggctaagtgttgactagcttgagagtggaactcctaggcgcaggagtctgagaaagggtctcacacgtacatggattttacctcccggaaacccgtcaggttttcacagcaaagagccaagatagaccctgtcctggctctggcaaagggaaggggaaagtaatgactttgaagtgcgctcagaatgttctctatgataaagacttactctccaaggaaaagggctttaccagagtcttatcccatctggggagaagatagttctctgactcgaggcacctctagattcctgtgtcaactaaggaaggaggaaaaaggttaagaaacatttgtaaaggtcacagtacagcaacataggcccaccaaaagattgagatgtaatcctaagaaaatggaatgcttcccttccccactccttaccaccacagcaacagggctccttataataacagtggattacagctgaaagagctgcaagatgcagacaccggctggccaaggagagggggtctcaggaaagtccaaagacaacaggagagatgaaaaaaaaaaaaaaaaaagacactagaggactttgaaacctctgacaaccacatttatagcaaacattatatacaacccaatcttagacagataagcctcaagctgaagtcctttttgcctcatttcctgttatctgatacatcatgtctagctttcaacagaaaattacacagatga

SEQ ID NO: 167 - DNA, 1787 bp, Homo sapien
cgagctcggtaccccaagcagttaatacagactcagagtcagacagttttgcccaaagacccacaactggttaatggcaaatgctagctgtcctcatgaatcctagcttagtacttttcccattccacccattggctaatgttttaacaacaaggtcctcgcggttcttgttgagcaacacatttccgcttctggcattcaccagcttttccacttattctctcccactcttctgcagtgaaaactacactgcagccaagctgaactggctatattgaaatacgttattctgattcctgcctctgcgtctttgctattgctttgccctttatcaaagtgacatttcttcacaaacttaattctacttattttctaacttctcctcaggtctcagaatattcaaacccataccatctcttctctttgctaaactaccttgttacaatgcactcagacatttatactctctgtgatgattatattttgtcttatccctttgatgagcttcttaaagactgtgattactattttcatgcatatatcctttttctgtctccctcactagaatataagttcctcaagggcagggactatagctgtctttttcgccataccttactatccagttgctatccagcaagtgtcttagcaccataataggtgctcaacaaatatttattgaatgagtgaatcaatttttctcttcccaagcatgctattattctccttaagtttgccatgaattctcaataaatacttttctaagcaaacatttctgtttctataaagtaagtattgaaaataggaatatgaaaaaaacaaagtaaggcactccagcatgtaaagtgcttgggagtcctcactcccttccaaacctgagcaagtaaaacttggtaagttttcctggaactgtcagcaatctcagggcaaatcacttgccaccccaaaatctgaagaaataggtacattcagacagtcacagctaagatttgcttacctacagcagaagcaactggaaccatagactagaagggccatttaaatagtaattttgatgaattgctggaggctaagtgttgactagcttgagagtggaactcctaggcgcaggagtctgagaaagggtctcacacgtacatggattttacctcccggaaacccgtcaggttttcacagcaaagagccaagatagaccctgtcctggctctggcaaagggaaggggaaagtaatgactttgaagtgcgctcagaatgttctctatgataaagacttactctccaaggaaaagggctttaccagagtcttatcccatctggggagaagatagttctctgactcgaggcacctctagattcctgtgtcaactaaggaaggaggaaaaaggttaagaaacatttgtaaaggtcacagtacagcaacataggcccaccaaaagattgagatgtaatcctaagaaaatggaatgcttcccttccccactccttaccaccacagcaacagggctccttataataacagtggattacagctgaaagagctgcaagatgcagacaccggctggccaaggagagggggtctcaggaaagtccaaagacaacaggagagatgaaaaaaaaaaaaaaaaaagacactagaggactttgaaacctctgacaaccacatttatagcaaacattatatacaacccaatcttagacagataagcctcaagctgaagtcctttttgcctcatttcctgttatctgatacatcatgtctagctttcaacagaaaattacacagatga

SEQ ID NO: 168 - DNA, 743 bp, Homo sapien
tgcaaatccaaaggattgtgattattacaattgttattttgccaactttttattattgacttctaatttaattgtaaaactgtgcatgatattaatttttggcatggatcagactacttttgtactttagtaaggcatcaattgttttaaatgtacctatgtttgaaaattatattctttctcttttggttggtgtaaggttctaatatacatatctcttagatgaagcttgttaattctgtcggtcaaatatttcatatgcttatttattgtctaattgaactatcattttctgagctaggtatcttaaaagcttcccctatgattatagatttattaatctttccttgtaattctacctatttttacttcagatatttttgagactacatggctaagtgtatacatttcaattattttatcttcctggtgacactctcctttcatcattatgtactgctatgtattctattttgagtaaaagcctcaatattttgcttactattaaaagaggtaaggaaactttattttggtaaaaatgtattgattttttaaaaattattttgcctaaaatttttaggtgactttaatatttcttctaaatctaacaagatttttatttttaaggcagaccgagagtctgtattttgataggcagattttatctgtttacatttactgagattactgatatgtttggacttttttctaccatggtatttttgtgggtttatgttcatgat

SEQ ID NO: 169 - DNA, 748 bp, Homo sapien
tgcaaatccaaaggattgtgattattacaattgttattttgccaactttttattattgacttctaatttaattgtaaaactgtgcatgatattaatttttggcatggatcagactacttttgtactttagtaaggcatcaattgttttaaatgtacctatgtttgaaaattatattctttctcttttggttggtgtaaggttctaatatacatatctcttagatgaagcttgttaattctgtcggtcaaatatttcatatgcttatttattgtctaattgaactatcattttctgagctaggtatcttaaaagcttcccctatgattatagatttattaatctttccttgtaattctacctatttttacttcagatatttttgagactacatggctaagtgtatacatttcaattattttatcttcctggtgacactctcctttcatcattatgtactgctatgtattctattttgagtaaaagcctcaatattttgcttactattaaaagaggtaaggaaactttattttggtaaaaatgtattgattttttaaaaattattttgcctaaaatttttaggtgactttaatatttcttctaaatctaacaagatttttatttttaaggcagaccgagagtctgtattttgataggcagattttatctgtttacatttactgagattactgatatgtttggacttttttctaccatggtatttttgttggtttatgttcatgatgcttt

SEQ ID NO: 170 - DNA, 278 bp, Homo sapien
cccacgcgtccgacaacttaaaaatcgcagtttcattactgatttttaaatgaaagagattggcttaaatgggaaaccagaaaattaatattgatgactaatattaaggtctgttaatataacacataaaggaagagaatttgattctatttgagattataaataaaagcaaatgtctttccttctgttttgatattaagggggaaattaaaaaaaataaattgtttaccttattccacaaactctggattcaacttaaaaatacacattttaaaaat

SEQ ID NO: 171 - DNA, 277 bp, Homo sapien
gtcataaacctacaacttaaaaatcgcagtttcattactgatttttaaatgaaagagattggcttaaatgggaaaccagaaaattaatattgatgactaatattaaggtctgttaatataacacataaaggaagagaatttgattctatttgagattataaataaaagcaaatgtctttccttctgttttgatattaagggggaaattaaaaaaaataaattgtttaccttattccacaaactctggattcaacttaaaaatacacattttaaaaat

SEQ ID NO: 172 - DNA, 1286 bp, Homo sapien
  misc_feature (1275)..(1275): n=a, c, g or t
ggtgagatggtggggaaggctggggactctggtgagatggtggggaaggctggggactctggtgagggtgtggggaaggttggggactctgtggtgatgttgtggggaaggctggggactctggtgaggttgtggggaaggttggggactctggtgaggttgtggggaaggttgaggactctgtggtactctgatggggaaggttgggtacatcgtggtgaggaagactggggacactgtagtgaagtttctggactcacccttgaactacacatgcatagatctggccctaaactacatgccaacagctttgtgaactcagtgtcattgtggacagttgactgctcaagtcccagtcttgtctctgagtgttgcacatgaaagacagatccaaagatcaaaaggaaggttttgaaatggaattaaattgaactgcagtccaccaaaaacaagtcagacctcacaccctgaatctaaccacatgaagtgcttggtagcaggaaaagcaacactgttgataggaccatggaagactcacatctcactgcataatgttcagaatgtccaagataaaaaccaaagttatgtatgaagagttgagtttctcagctgccaacggaaatgacagtcaatagaaaccaactcaggctgacagatcagacttatccaagattttgaagtcactgttgtaactgtgctctaacgggtaagagcaaacgttcttggaatgaacgggaagaccgaacatctccatagagaaatagaagtttaaagaaaaccaaatagataattttaaattgaaaaatacaataatctaaataatatatttcacgacacaactgtagaatggagatgagaggaaatagtgaagttgaaggcagatcattaaaaaatgtccattctgaacaggaagcaattgaaaaacagtaacaaaaacatgaatagagtcagggacaaattccaaagggtctaatattctgtcatctgagcccagaggagaggagagtgtgacacagaggaaaaatagctgaagaaataagggctgaaaacacccaaaatttggtgaaagacaaacacagatgtaagaagttcagtgaatcccaaacatatcacatcacaatcaaactggtaagaatcaaagtcaaataaaaaatgtcgaaagcagttaagaggaaaaggatccaaattactatgggtttctcaccagaaacgagggaggtcagaaggaagtggcacatttttcagatgctgcaagaaaagaacgtttgacccagnattctatattc

SEQ ID NO: 173 - DNA, 1928 bp, Homo sapien
ggtgagatggtggggaaggctggggactctggtgagatggtggggaaggctggggactctggtgagggtgtggggaaggttggggactctgtggtgatgttgtggggaaggctggggactctggtgaggttgtggggaaggttggggactctggtgaggttgtggggaaggttgaggactctgtggtactctgatggggaaggttgggtacatcgtggtgaggaagactggggacactgtagtgaagtttctggactcacccttgaactacacatgcatagatctggccctaaactacatgccaacagctttgtgaactcagtgtcattgtggacagttgactgctcaagtcccagtcttgtctctgagtgttgcacatgaaagacagatccaaagatcaaaaggaaggttttgaaatggaattaaattgaactgcagtccaccaaaaacaagtcagacctcacaccctgaatctaaccacatgaagtgcttggtagcaggaaaagcaacactgttgataggaccatggaagactcacatctcactgcataatgttcagaatgtccaagataaaaaccaaagttatgtatgaagagttgagtttctcagctgccaacggaaatgacagtcaatagaaaccaactcaggctgacagatcagacttatccaagattttgaagtcactgttgtaactgtgctctaacgggtaagagcaaacgttcttggaatgaacgggaagaccgaacatctccatagagaaatagaagtttaaagaaaaccaaatagataattttaaattgaaaaatacaataatctaaataatatatttcacgacacaactgtagaatggagatgagaggaaatagtgaagttgaaggcagatcattaaaaaatgtccattctgaacaggaagcaattgaaaaacagtaacaaaaacatgaatagagtcagggacaaattccaaagggtctaatattctgtcatctgagcccagaggagaggagagtgtgacacagaggaaaaatagctgaagaaataagggctgaaaacacccaaaatttggtgaaagacaaacacagatgtaagaagttcagtgaatcccaaacatatcacatcacaatcaaactggtaagaatcaaagtcaaataaaaaatgtcgaaagcagttaagaggaaaaggatccaaattactatgggtttctcaccagaaacgagggaggtcagaaggaagtggcacatttttcagatgctgcaagaaaagaacgtttgacccagaattctatattcaggacacacaacaaaaaaattccctcttgaggacatcagggcaaatctaccgccctccttcgacatgaacgggaacccacgccgaacgtacaggggcacgacagcgctactcaacgcgggaacaacataacacccccggctctaccggccggcaggaagagccacctggggacctccagcgaactgaacggacaacccccaacagcaacagggcccaaatatcggggcaccaaagaaacaactatatataacacacctcaaacgctccgctaacacaccacgcgcgtagaccccgtcgacgcacaacacgaacgagcacacaaacccgccacagaaaacacaagagccgagccacccgccccaccgccccgcacagcaccgccgccacaacagaccacgacgcgccgagccgcgggcacacccaacagtgaaggaacatgaagcaaacaagcggggacacgaagcagaatgatcaccccgggcacgacacaccgacgcggcactaccataacagtgccgacgaaccaccaccacccaacgcaaaacagcagcaccgcgcggcacacacacaaaggacctctaagccaacacaacccacacacaggagcgaacccacgaacggagcgaacagagtggagcaaa

SEQ ID NO: 174 - DNA, 1324 bp, Homo sapien
ggtgagatgctggggaaggctggggactctggtgagatggtggggaaggctggggactctggtgagggtgtggggaaggttggggactctgtggtgatgttgtggggaaggctggggactctggtgaggttgtggggaaggttggggactctggtgaggttgtggggaaggttgaggactctgtggtactctgatggggaaggttgggtacatcgtggtgaggaagactggggacactgtagtgaagtttctggactcacccttgaactacacatgcatagatctggccctaaactacatgccaacagctttgtgaactcagtgtcattgtggacagttgactgctcaagtcccagtcttgtctctgagtgttgcacatgaaagacagatccaaagatcaaaagggaggttttgaaatggaattaaattgaactgcagtccaccaaaaacaagtcagacctcacaccctgaatctaaccacatgaagtgcttggtagcaggaaaagcaacactgttgataggaccatggaagactcacatctcactgcataatgttcagaatgtccaagataaaaaccaaagttatgtatgaagagttgagtttctcagctgccaacggaaatgacagtcaatagaaaccaactcaggctgacagatcagacttatccaagattttgaagtcactgttgtaactgtgctctaacgggtaagagcaaacgttcttggaatgaacgggaagaccgaacatctccatagagaaatagaagtttaaagaaaaccaaatagataattttaaattgaaaaatacaataatctaaataatatatttcacgacacaactgtagaatggagatgagaggaaatagtgaagttgaaggcagatcattaaaaaatgtccattctgaacaggaagcaattgaaaaacagtaacaaaaacatgaatagagtcagggacaaattccaaagggtctaatattctgtcatctgagcccagaggagaggagagtgtgacacagaggaaaaatagctgaagaaataagggctgaaaacacccaaaatttggtgaaagacaaacatagatgtaagaagttcagtgaatcccaaacatatcacatcacaatcaaactggtaagaatcaaagtcaaataaaaaatgtcgaaagcagttaagaggaaaaggatccaaattactatgggtttctcaccagaaacgagggaggtcagaaggaagtggcacatttttcagatgctgcaagaaaagaacgtttgacccagaattctatattcaggaaaaaaaaaaaaattcctttaggaatcaaggcaaa

SEQ ID NO: 175 - DNA, 402 bp, Homo sapien
atgacttcctatgggatatttataaattacttctccagatgcgatttatcaatcagattaatttttgccagaggtgatgttgcctaataacatcatttgcatcctgcctttatcaggtttccaggggtcctgagctagaacatttgaccaaagatcagttcttacacagacaaggaaagagtttcataactacttacaaatgaggtctcaacaaaaacagcaaaagaatactttggggatctttacaagttgatactaaaattcataagaaaataaagaagcagaataggaaaattctaaaagagaaaaataaaggattataatgtgagtggcatttcaaaggtctgggattcactaaatgatgtggggaaaatgaatatccatgtagggaagaaaagaaac

SEQ ID NO: 176 - DNA, 420 bp, Homo sapien
atgacttcctatgggatatttataaattacttctccagatgcgatttatcaatcagattaatttttgccagaggtgatgttgcctaataacatcatttgcatcctgcctttatcaggtttccaggggtcctgagctagaacatttgaccaaagatcagttcttacacagacaaggaaagagtttcataactacttacaaatgaggtctcaacaaaaacagcaaaagaatactttggggatctttacaagttgatactaaaattcataagaaaataaagaagcagaataggaaaattctaaaagagaaaaataaaggattataatgtgagtggcatttcaaaggtctgggattcactaaatgatgtggggaaaatgaatatccatgtagggaagaaaagaaacaaaaaaaaagccgattca

SEQ ID NO: 177 - DNA, 587 bp, Homo sapien
  misc_feature (246)..(246): n=a, c, g or t
  misc_feature (256)..(256): n=a, c, g or t
ccttttttccccgcaacttgaactgtgactctttcagatatttcttaaatctgtatgagtcattttttaagcttagggatttgatatgtattaatgtcgcctttgtcttctgtagattttagcattttattacctcttaagaaactctgggcccagactttcagtcatatttcttattcctatggtacagttctcacttaaaggcttaattattagtagggttaaatatatacaggttatctctanaagtacttanatttttacataagggcttatgtgatacaagatacggaaacaaaagtttttggatttttatgcagtagtttgcaggaaagcaaatacatagtagatcgtatgccacttaggtatgttcaggtcatgccagtttattcttgttgggccacacacacatgtatgtgtgtgtaaaaggaatttttagtattgaagcaaacaaattgtcagtttaataattttctcttacatagcacaagatggcagataccacctactgtacaacaatctaataatccctaccttagttcccctgagttatagaagatgctaaagatttagttgtaaagggaagt

SEQ ID NO: 178 - DNA, 2381 bp, Homo sapien
gctttgtgttggattgttttctcgtgctattgcttgtggtgtcttctttgttgttttcttttgttgtctgttgtgggctttcgcatgtgtgtttggcttgtgttgggcctgtgtgcttccttctggtcttgtggtggtgcggcctctgcttgcttgtgttttttgccttgtggctgttgtgtgggtttgggttgggtgtttgttgtggtggggggttcgtgtggttgcgtgtagtgtatgtgttggtgggggccgtggtggcgctgagtcagtgtcgctgtggttgtccgtgcatattgtgggttttagtgcgtgcgaggtccacttggactctctgtggatggtcataagtttatgatttttagctcctgtgagtgtttgggggcaaactacacagagaagacatgggtggttcagcccattccactaaaatatgttgccagattctggcctaactcagtattaccttttttcctaaaaatcatttttcacattttgagtaatagggcttatgctttgatgtgaaaaaatgtcaggaaatgagtgtagacaataccctatataacactagctaagttttatagtgctccatgcctttgtgtaccgttccactgattatcttgcctatctttggtgtgtaaactattttcatatcttctaaggctcttaacccactcttttctgaagccgcacagtcctttaatatgtcttgtttccttcctaaaagtttaaagtagagagcaaaaatgcaaatacccaaaggatactgttagtatgtaacttttgtgtgctgctttatttctagagtttgcattttttaattgttcattcacagaaaatcctaatattgccctatatggttggtttttttcctaagtggttaatatttaaacccgctagctgtagcatgataatgtctttgactgagcttatgtagtagaaaggatgtgtctgttttctgggacttttagtcttcacttatttttctataacaatctaattgttaaaaggaaaagatggcttattgacacatatttcattaaactttcactggaagaacagtgggtcatcctactgtggattaagaatactactgacaagcaaaaagcattaagctctgtaactgtctccaacaccaccttcaccccgcctttagtgtaccttagtgtactttagtgtacctattttggcagtacggtgttttccagattctacttgtgccctgcacattgtgaggactcattaaatatttattaaattaatgaatgactaacaggaagagaaagattgtttgtgagtgttaagaatgagtgatgattgagaaattgatggattagtgcaatggattgggaatgaatgatgctttctagtttcgtaatacttgggaagagctattgcatatagagtaagttgatttagactttttttttcttcatttcattaccttgtttaaacttgttaaatcccagccaagaaatgcagctctgtaattgtcaattaactgtattataatatatattaaaaatttgtagagctaaagaacccacttgcattaagaacaccactttctgttcatttgtgatactagaggacagatcctgcatacagagccgaaactgcttttaatcatctgaagaaattctttgatttcagtgacttactgatctgtacctgtgcacatatcattttatgcttctccttttttccccgcaacttgaactgtgactctttcagatatttcttaaatctgtatgagtcattttttaagcttagggatttgatatgtattaatgtcgcctttgtcttctgtagattttagcattttattacctcttaagaaactctgggcccagactttcagtcatatttcttattcctatggtacagttctcacttaaaggcttaattattagtagggttaaatatatacaggttatctctaaaagtacttaaatttttaaataagggcttatgtgatacaagatacggaaacaaaagtttttggatttttatgcagtagtttgcaggaaagcaaatacatagtagatcgtatgccacttaggtatgttcaggtcatgccagtttattcttgttgggccacacacacatgtatgtgtgtgtaaaaggaatttttagtattgaagcaaacaaattgtcagtttaataattttctcttacatagcacaagatggcagataccacctactgtacaacaatctaataatccctaccttagttcccctgagttatagaagatgctaaagatttagttgtaaagggaagtaacatgatttttttttttctaaaaagcctgttttaagctaactattattttgctactggaaaattatattttaaaacctaccgatatttaaagtatg

SEQ ID NO: 179 - DNA, 3450 bp, Homo sapien
tttatgttgcagttcaactgaagaatgttggtatgaatgccgaataacttgatgtaattgttttgagaatcaaatggctagatgggcgaatgtttaaaaatgtaaactagttctctttctctagcatgttctacccaattaccaaagtcagaagtatggaatttatatgaaaaaaatgcttccaatgtaatccattttttaaatggttatttaagaaaaaactaacttaagagtttatgtaattgcagtaaaggaaaattatttttattgctagttttgatagattatttttacctcaaattggtatatgccaaaacacatcagtccttataaaattgatttttttttcctgaaaacctggaatgccatttttagctattactactttttaatttcaaattcacttatgacaaatgggagaaatatataaagaaatagatccataaaaatattcctttttaaaaatctaaattattgaggatacactatggaaactataaaattatcatgaagtgactgttaaagtttactggcaaatgccaagggaaggaatagtatgtgcaaaacaaaacactttgatactgaacttaatcagggatgaggtaccaaagtatccacattatagccgtatcttatgtttccaataacaagggctgagtttttcaggtaggtgggatgagggtggggaatgggccatgtaatgtctgctttcttatatttgcccttttgtaagtggtctgtttcttcttttcatatactttgttttgccaatccattacgtattttttgtcacttttgtgtgtcatttttgtatatctttcctttcttacttcaggggtgtgtcttcaagatttctaccccctatttgcaatgaatttcatacctcatctaaaatacattcatataccagaaatatgaagagtggcccttctaaaagtttccctaatgatggaagctgtcagttgtcctatctgtgcagaatgtgagtaatagtggcagaaataagtgtgacaacaatgctttgcctgttgttctttttacttgctaggtaatttgtaaagtggggataaagatgtagggaaagtaaacctctctctcactgttacggaaagcctggacttgagttaggtagactgccttaaagaagaagaaatatgtccttttctttggcatcatggttttgttgagtggcagactgttgaagtgagttgagacttaagaacgccagaaaagttgtctagcctggccccagtagacagaatttgttcttctctcaagtaaaaaattacctttttatagcttttatattatttagatgaaaaaataccattatgaacataattccatggccctttgtgtacaaagcatattttgaattaaatacctcaaggtccacctagacctctatggataaaatcataagtttatgatttttagctcctgtgagtgtttgggggcaaactacacagagaagacatgggtggttcagcccattccactaaaatatgttgccagattctggcctaactcagtattaccttttttcctaaaaatcatttttcacattttgagtaatagggcttatgctttgatgtgaaaaaatgtcaggaaatgagtgtagacaataccctataaaacactagctaagttttatagtgctccatgcctttgtgtaccttccactgattatcttgcctatctttggtgtgtaaactattttcatatcttctaaggctcttaacccactcttttctgaagccgcacagtcctttaatatgtcttgtttccttcctaaaagtttaaagtagagagcaaaaatgcaaatacccaaaggatactgttagtatgtaacttttgtgtgctgctttatttctagagtttgcattttttaattgttcattcacagaaaatcctaatattgccctatatggttggtttttttcctaagtggttaatatttaaacccgctagctgtagcatgataatgtctttgactgagcttatgtagtagaaaggatgtgtctgttttctgggacttttagtcttcacttatttttctataacaatctaattgttaaaaggaaaagatggcttattgacacatatttcattaaactttcactggaagaacagtgggtcatcctactgtggattaagaatactactgacaagcaaaaagcattaagctctgtaactgtctccaacaccaccttcaccccgcctttagtgtaccttagtgtactttagtgtacctattttggcagtacggtgttttccagattctacttgtgccctgcacattgtgaggactcattaaatatttattaaattaatgaatgactaacaggaagagaaagattgtttgtgagtgttaagaatgagtgatgattgagaaattgatggattagtgcaatggattgggaatgaatgatgctttctagtttcgtaatacttgggaagagctattgcatatagagtaagttgatttagactttttttttcttcatttcattaccttgtttaaacttgttaaatcccagccaagaaatgcagctctgtaattgtcaattaactgtattataatatatattaaaaatttgtagagctaaagaacccacttgcattaagaacaccactttctgttcatttgtgatactagaggacagatcctgcatacagagccgaaactgcttttaatcatctgaagaaattctttgatttcagtgacttactgatctgtacctgtgcacatatcattttatgcttctccttttttccccgcaacttgaactgtgactctttcagatatttcttaaatctgtatgagtcattttttaagcttagggatttgatatgtattaatgtcccctttgtcttctgtagattttagcattttattacctcttaagaaactctgggcccagactttcagtcatatttcttattcctatggtacagttctcacttaaaggcttaattattagtagggttaaatatatacaggttatctctaaaagtacttaaatttttaaataagggcttatgtgatacaagatacggaaacaaaagtttttggatttttatgcagtagtttgcaggaaagcaaatacatagtagatcgtatgccacttaggtatgttcaggtcatgccagtttattcttgttgggccacacacacatgtatgtgtgtgtaaaaggaatttttagtattgaagcaaacaaattgtcagtttaataattttctcttacatagcacaagatggcagataccacctactgtacaacaatctaataatccctaccttagttcccctgagttatagaagatgctaaagatttagttgtaaagggaagtaacatgattttttttttctaaaaagctgttttaagctaactattattttgctactggaaaattatattttaaaacttacagatatttaaagtatg

SEQ ID NO: 180 - DNA, 956 bp, Homo sapien
cccggctcacgcggaggcgcgcccgaactgtcgcggccgccgccaacatggccgagaccagcgaggaggtggcggtgctggtgcagcgggttgtgaaggacatcactaacgccttcaggaggaacccacacatgtgagtcgcgcgcctccgccgcctccgagggtcgtcgggagcgggcgggggcggggccaagcgtccacccgacctcgggcggcgggcggacagcgggtcctggcccacgagcccttctagggaggaggcagagccgtgtcgggcgggaccgttgtcggccgccgctggcccggctttccgctaccgggacgcgctcgcggtcgagtccctagaagtgacctcaaaaaatcaaaacggaactactttctctgtccctccccaccttttcataggagttcacgaaactccagagacgtcccccgtaggtcgacatccttcctgtgtttaaggtactcgggcgcacacaacgatgtgggtccgtgtatgccttgtaaacacaactcttgagattcatcccggacgttggcaagagggggtaaccgatcctcttacttttaatgagcctcaaacccctcagtttactaactaaaggtggtttgaggctgcttttgactttagccttacttgccacaaaattgtaaagtgactccgataatacattgtgttttgaaaggtgaacagaacattctcaagagaagcttctgtgggcgcagtgtggagtctgggataaagcaaatgaaaccttgatactttttagcataagcggattcatagttacaaggagcatgttaactcatttttatcccaacactgctgccctctttaacgggacactgcagaactgacatatgtatctcttccattttacttgaagtactgtgggaagataccgcaagagtctactttttgtaacactttgcttttatgtaacaagtgaaaagaa

SEQ ID NO: 181 - DNA, 418 bp, Homo sapien
cccggctcacgcggaggcgcgcccgaactgtcgcggccgccgccaacatggccgagaccagcgaggaggtggcggtgctggtgcagcgggttgtgaaggacatcactaacgccttcaggaggaacccacacatgtgatgattgtaaaacagttaagaagccgttggatgttttgctcccttgtggcacacaattggagacgtgcaactgtgccacattaaaaacaaaacactgctggcctcaaaacacacctgccacctctgacagcatccacttccctcccccttatgactgctgcctttttcaaaatgagagtgtttggaatgatttcctggcagtatccatagtggttgctgagccttctaaagaatgctttgatgccttgctgtatatcagtctttcgatttctttttgagaat

SEQ ID NO: 182 - DNA, 415 bp, Homo sapien
aatttatttttattttattctttagactggagctcatgatttttttttttaagtattctaaccggttcagcttttctgcctaaaaaagttgccaaacgtgtatcttaccaaagtgttcttttcctctaaggtgatgattgtaaaacagttaagaagccgttggatgttttgctcccttgtggcacacaattggagacgtgcaactgtgccacattaaaaacaaaacactgctggcctcaaaacacacctgccacctctgacagcatccacttccctcccccttatgactgctgcctttttcaaaatgagagtgtttggaatgatttcctggcagtatccatagtggttgctgagccttctaaagaatgctttgatgccttgctgtatatcagtctttcgatttctttttgagaat

SEQ ID NO: 183 - DNA, 1641 bp, Homo sapien
cccggctcacgcggaggcgcgcccgaactgtcgcggccgccgccaacatggccgagaccagcgaggaggtggcggtgctggtgcagcgggttgtgaaggacatcactaacgccttcaggaggaacccacacatagatgaaattggcctgatcccatgtcctgaagctaggtataaccggagtcccatagtcctggttgaaaacaaactgggtgtggagagctggtgtgtcaagttccttttaccatatgtccacaacaagctccttttgtacagaacaagaaagcaatggctgaacagagatgaattgatagatgtcacatgtaccctgctgcttctaaacccagactttaccactgcatggaacgtgaggaaagagctgatcctctctggcactttaaatccaattaaggatttacatctgggaaaactcgccttaaccaagtttccaaagagtccagaaacatggattcacaggcgatgggtgctacaacagctaattcaggaaacctccttgccttcctttgtgaccaaaggaaacttgggaacaattcccacagaaagggcacagcgactcatacaagaagagatggaggtctgtggtgaagcagcagggagatacccaagcaactataatgcttggtcccatcgcatctgggttttacagcacttggccaagctagatgtcaaggtaggaatattactgtctcctgggcagactgcctgtctgcccttaaaatcttctggtagtagttcattctcagaagagctttgaaggagtagagaaactgatggtctggcaacttgagagaatcgcaacagctgctacctctggaggaaccctgtaattaaataaaaagcttgcattccccactagtgctgtttttggcagtcttaaggctagtgcattggtaaagcaaggcaggtttaaccaactgaggaagattgagcataactcactttatcctgaaacaggaagggattattaagccttatagaactggaattgctatttcttggtagtgtttggttatgtgacaatatactaagtcagctggctgtcttttcacactctcgtcctctgaaaagggggagaggagggcagggatagacaatctcacccaggtgtttttaaaattggctgagcctataaattacctggggattcctaagttccactccaagcctactaaagcagaatgagggtggatctagagatcagtattttccactgactcagggttatttgaatgcagagccagtttggaaactctcacagcctaatcctttcagtttagaaatgaggagatggagatttccagagaattttaatggcttagacttagctacagttgtaccacttattattcatcagaatgagagccacatgtcccttttgctccttatatactacggtgtctcagttttttcttttctgatggcgtcacagtgccataagaatctagggtgctcatctaaaaagcttctcaggcttgagacagttaaaagaggtcaagttgaagattgaagtgccccaggtgatgctttcagataagtggggaagtgttatgtaattttaacttaccaccctcttcttcctacatccctcttcccatgctcccatttctctctttgtttcctgg

SEQ ID NO: 184 - DNA, 1610 bp, Homo sapien
caaaatattggtaagaatggtcttgtcaaaaaaggaacaaatcaaagagaaatcagaggcaataatggagaaagaagaacctttgggaactcttcttcttacttcccttttttcttcttaaaagattcttcttgatgaactatcttctactaaacattgggcatctatgcacgtttcagaccacagtggatttcactaccgccagtttttgcttaagtctttgattagccaaactgtgatagacagttctgtgatggagcaaaatcctttgagaagtgagccagccctagttcctccaaaagatgaagaagcagcagtttcaacagaagaaccaaggattaatcttccccatcttctagaagaagaagttgaattcagcactgatcttattgattcctacccaggacatgaaaccctttggtgtcataggtaagaaaagattctacttgtgccctgcacattgtgaggactcattaaatatttattaaattaatgaatgactaacaggaagagaaagattgtttgtgagtgttaagaatgagtgatgattgagaaattgatggattagtgcaatggattgggaatgaatgatgctttctagtttcgtaatacttgggaagagctattgcatatagagtaagttgatttagactttttttttcttcatttcattaccttgtttaaacttgttaaatcccagccaagaaatgcagctctgtaattgtcaattaactgtattataatatatattaaaaatttgtagagctaaagaacccacttgcattaagaacaccactttctgttcatttgtgatactagaggacagatcctgcatacagagccgaaactgcttttaatcatctgaagaaattctttgatttcagtgacttactgatctgtacctgtgcacatatcattttatgcttctccttttttccccgcaacttgaactgtgactctttcagatatttcttaaatctgtatgagtcattttttaagcttagggatttgatatgtattaatgtcccctttgtcttctgtagattttagcattttattacctcttaagaaactctgggcccagactttcagtcatatttcttattcctatggtacagttctcacttaaaggcttaattattagtagggttaaatatatacaggttatctctaaaagtacttaaatttttaaataagggcttatgtgatacaagatacggaaacaaaagtttttggatttttatgcagtagtttgcaggaaagcaaatacatagtagatcgtatgccacttaggtatgttcaggtcatgccagtttattcttgttgggccacacacacatgtatgtgtgtgtaaaaggaatttttagtattgaagcaaacaaattgtcagtttaataattttctcttacatagcacaagatggcagataccacctactgtacaacaatctaataatccctaccttagttcccctgagttatagaagatgctaaagatttagttgtaaagggaagtaacatgattttttttttctaaaaagctgttttaagctaactattattttgctactggaaaattatattttaaaacttacagatatttaaagtatg

SEQ ID NO: 185 - DNA, 891 bp, Homo sapien
cccggctcacgcggaggcgcgcccgaactgtcgcggccgccgccaacatggccgagaccagcgaggaggtggcggtgctggtgcagcgggttgtgaaggacatcactaacgccttcaggaggaacccacacatagatgaaattggcctgatcccatgtcctgaagctaggtataaccggagtcccatagtcctggttgaaaacaaactgggtgtggagagctggtgtgtcaagttccttttaccatatgtccacaacaagctccttttgtacagaacaagaaagcaatggctgaacagagatgaattgatagatgtcacatgtaccctgctgcttctaaacccagactttaccactgcatggaacgtgaggtatgtcattttcattagtgatatgataaagtttgtccaaatttctgaagacatgtaagccccataagttgttagcttttgaaaacgaaatataaaccattttacacttatttcttctccctattctttatacctgtgacaattctaaataggcattttgcccctttttgtgtggtgtcttcataaactttcttgcctgaaatataaattgtcatgttgagttacagtatactgtttgatacatgcttttattttccttcattttttggggtgggagactaatgggcaatgggcataactggttggcttataaggcatataacattatatcattggtatttgagaagcactgcagtgtagtggaaagtgtatgggatgagaaagagggagtcatgcttgcctctggctttttccctgagcaactgaaaggatggaattgccatttactgaaatggcagtgtctggaagagaaacagatttaggtaggcggtgtttgttataggccaagagttcagattggg

SEQ ID NO: 186 - DNA, 2175 bp, Homo sapien
cccggctcacgcggaggcgcgcccgaactgtcgcggccgccgccaacatggccgagaccagcgaggaggtggcggtgctggtgcagcgggttgtgaaggacatcactaacgccttcaggaggaacccacacatagatgaaattggcctgatcccatgtcctgaagctaggtataaccggagtcccatagtcctggttgaaaacaaactgggtgtggagagctggtgtgtcaagttccttttaccatatgtccacaacaagctccttttgtacagaacaagaaagcaatggctgaacagagatgaattgatagatgtcacatgtaccctgctgcttctaaacccagactttaccactgcatggaacgtgaggaaagagctgatcctctctggcactttaaatccaattaaggatttacatctgggaaaactcgccttaaccaagtttccaaagagtccagaaacatggattcacaggcgatgggtgctacaacagctaattcaggaaacctccttgccttcctttgtgaccaaaggaaacttgggaacaattcccacagaaagggcacagcgactcatacaagaagagatggaggtctgtggtgaagcagcagggagatacccaagcaactataatgcttggtcccatcgcatctgggttttacagcacttggccaagctagatgtcaagattcttcttgatgaactatcttctactaaacattgggcatctatgcacgtttcagaccacagtggatttcactaccgccagtttttgcttaagtctttgattagccaaactgtgatagacagttctgtgatggagcaaaatcctttgagaagtgagccagccctagttcctccaaaagatgaagaagcagcagtttcaacagaagaaccaaggattaatcttccccatcttctagaagaagaagttgaattcagcactgatcttattgattcctacccaggacatgaaaccctttggtgtcataggtaagaaaagattctacttgtgccctgcacattgtgaggactcattaaatatttattaaattaatgaatgactaacaggaagagaaagattgtttgtgagtgttaagaatgagtgatgattgagaaattgatggattagtgcaatggattgggaatgaatgatgctttctagtttcgtaatacttgggaagagctattgcatatagagtaagttgatttagactttttttttcttcatttcattaccttgtttaaacttgttaaatcccagccaagaaatgcagctctgtaattgtcaattaactgtattataatatatattaaaaatttgtagagctaaagaacccacttgcattaagaacaccactttctgttcatttgtgatactagaggacagatcctgcatacagagccgaaactgcttttaatcatctgaagaaattctttgatttcagtgacttactgatctgtacctgtgcacatatcattttatgcttctccttttttccccgcaacttgaactgtgactctttcagatatttcttaaatctgtatgagtcattttttaagcttagggatttgatatgtattaatgtcccctttgtcttctgtagattttagcattttattacctcttaagaaactctgggcccagactttcagtcatatttcttattcctatggtacagttctcacttaaaggcttaattattagtagggttaaatatatacaggttatctctaaaagtacttaaatttttaaataagggcttatgtgatacaagatacggaaacaaaagtttttggatttttatgcagtagtttgcaggaaagcaaatacatagtagatcgtatgccacttaggtatgttcaggtcatgccagtttattcttgttgggccacacacacatgtatgtgtgtgtaaaaggaatttttagtattgaagcaaacaaattgtcagtttaataattttctcttacatagcacaagatggcagataccacctactgtacaacaatctaataatccctaccttagttcccctgagttatagaagatgctaaagatttagttgtaaagggaagtaacatgattttttttttctaaaaagctgttttaagctaactattattttgctactggaaaattatattttaaaacttacagatatttaaagtatg

SEQ ID NO: 187 - DNA, 2005 bp, Homo sapien
tggcagactgtagaagtgagtgagacttaagaacgccagaacaagtggtctagcctggacccagtagacagaatttgttcttctctgcaagataaaaaattacctttttatagcttttatattatttaggatgaattgatagatgtcacatgtaccctgctgcttctaaacccagactttaccactgcatggaacgtgaggaaagagctgatcctctctggcactttaaatccaattaaggatttacatctgggaaaactcgccttaaccaagtttccaaagagtccagaaacatggattcacaggcgatgggtgctacaacagctaattcaggaaacctccttgccttcctttgtgaccaaaggaaacttgggaacaattcccacagaaagggcacagcgactcatacaagaagagatggaggtctgtggtgaagcagcagggagatacccaagcaactataatgcttggtcccatcgcatctgggttttacagcacttggccaagctagatgtcaagattcttcttgatgaactatcttctactaaacattgggcatctatgcacgtttcagaccacagtggatttcactaccgccagtttttgcttaagtctttgattagccaaactgtgatagacagttctgtgatggagcaaaatcctttgagaagtgagccagccctagttcctccaaaagatgaagaagcagcagtttcaacagaagaaccaaggattaatcttccccatcttctagaagaagaagttgaattcagcactgatcttattgattcctacccaggacatgaaaccctttggtgtcataggtaagaaaagattctacttgtgccctgcacattgtgaggactcattaaatatttattaaattaatgaatgactaacaggaagagaaagattgtttgtgagtgttaagaatgagtgatgattgagaaattgatggattagtgcaatggattgggaatgaatgatgctttctagtttcgtaatacttgggaagagctattgcatatagagtaagttgatttagactttttttttcttcatttcattaccttgtttaaacttgttaaatcccagccaagaaatgcagctctgtaattgtcaattaactgtattataatatatattaaaaatttgtagagctaaagaacccacttgcattaagaacaccactttctgttcatttgtgatactagaggacagatcctgcatacagagccgaaactgcttttaatcatctgaagaaattctttgatttcagtgacttactgatctgtacctgtgcacatatcattttatgcttctccttttttccccgcaacttgaactgtgactctttcagatatttcttaaatctgtatgagtcattttttaagcttagggatttgatatgtattaatgtcccctttgtcttctgtagattttagcattttattacctcttaagaaactctgggcccagactttcagtcatatttcttattcctatggtacagttctcacttaaaggcttaattattagtagggttaaatatatacaggttatctctaaaagtacttaaatttttaaataagggcttatgtgatacaagatacggaaacaaaagtttttggatttttatgcagtagtttgcaggaaagcaaatacatagtagatcgtatgccacttaggtatgttcaggtcatgccagtttattcttgttgggccacacacacatgtatgtgtgtgtaaaaggaatttttagtattgaagcaaacaaattgtcagtttaataattttctcttacatagcacaagatggcagataccacctactgtacaacaatctaataatccctaccttagttcccctgagttatagaagatgctaaagatttagttgtaaagggaagtaacatgattttttttttctaaaaagctgttttaagctaactattattttgctactggaaaattatattttaaaacttacagatatttaaagtatg

SEQ ID NO: 188 - DNA, 286 bp, Homo sapien
  misc_feature (98)..(98): n=a, c, g or t
  misc_feature (245)..(245): n=a, c, g or t
  misc_feature (255)..(257): n=a, c, g or t
taaggtcccagtgctctggaaggcccaagaaagtaggctaacttcagagaggaagaatgagtaaccataaaccacggcattagaaatgtgaaaaaagntacaaccacagatagagttatttttaattatgaaagaacagtatttaaaattatgctattgtaaaattgcttcagaagaaatttttaaaatctgaattgacctgtaactatgaaggaaactgaaaatcattgtaaaaaagcttcttncctttccccnnntttttctggatctggaaagtttaattttg

SEQ ID NO: 189 - DNA, 230 bp, Homo sapien
taaggtcccagtgctctggaaggcccaagaaagtaggctaacttcagagaggaagaatgagtaaccataaaccacggcattagaaatgtgaaaaaagatacaaccacagatagagttatttttaattatgaaagaacagtatttaaaattatgctattgtaaaattgcttcagaagaaatttttaaaatctgaattgacctgtaactatgaaggaaactgaaaatcatta

SEQ ID NO: 190 - DNA, 925 bp, Homo sapien
gggtgtaagccactgcacctggccaagtaaaagatatttttgaaagcaccaaatattctttatgggttttaggacttccaaaaatgaggtttcaggtaaataaggaagctaaacatttcatctatctgcccattgatctcgtcctcatttctggcatgtcctcttatatgtaccaggtctgtatggtggatagacgtgcatcaatcggtgattgttaaacaataatatgtgcaaggattttcgaggtacagtgaatgtccacctaacctttaacaggactgaggaaagagggaggaggtatcttagaaaaggtcgcagtttttcctaagagtaagaaacctccaggtgctggctgtgaagagaggagaaaggaaggaacacatgagtggctgttaattttacagattgaaggagcaaaagctttgaagtgggaaataacaaggagagtggtgagcagggggagggatttgggatggtggcagggagaagggtggtattgttaggaccctgaatgtgctagaatgctgagagggactgtcaagggtcagatgttcaagcacctcatgcataatgttaaggagcctaaagtttatccctaaagttattgaagggtttttatgttcagaaaggatatgcttaggtctgtcattctaatggattgggggaaggaggattgggagatggaagatagacgagacaagagacctagaatctatttagactctgacagtgtcccagacactggaatgaggatctgaagtagtaggaacaacgggacagagacattcggtaatatgtaagagcttcagctgaccagcctggtgatcagtttaatgtgacagagaagagggaggaagaaatatcagaatgggattttcatttcaagaatataagtactaggctcatcaccaccacatgagataga

SEQ ID NO: 191 - DNA, 1361 bp, Homo sapien
  misc_feature (86)..(86): n=a, c, g or t
  misc_feature (116)..(116): n=a, c, g or t
ttttttttttttaaggtgaagtctcgttctgtcgcccaggctggagtccggtgctgagatcttggcttactgcaacctccgcctcncaggttcaagcgattctcctgcctcagccnccgagtagctgggattacaggcatccactactacacccagctaatttttttttttttaaaggcagattctcactccatcactcaggttggagtgcagtggtgtgatcttggcccagtgcaccctctctgcctcccaggtctgagcgattctcgtcatgcctcagcctcctgagtagctgggattataggcgggaccaccatgcccggctaatttttgtatttttagtagagatggggttttgctatgttggccaggctgggctcgaactcctgacctcaagtgatccagcggccttagtatcccaaaatgctgggattacaggtgtaagccactgcacctggccaagtaaaagatatttttgaaagcaccaaatattctttatgggttttaggacttccaaaaatgaggtttcaggtaaataaggaagctaaacatttcatctatctgcccattgatctcgtcctcatttctggcatgtcctcttatatgtaccaggtctgtatggtggatagacgtgcatcaatcggtgattgttaaacaataatatgtgcaaggattttcgaggtacagtgaatgtccacctaacctttaacaggactgaggaaagagggaggaggtatcttagaaaaggtcgcagtttttcctaagagtaagaaacctccaggtgctggctgtgaagagaggagaaaggaaggaacacatgagtggctgttaattttacagattgaaggagcaaaagctttgaagtgggaaataacaaggagagtggtgagcagggggagggatttgggatggtggcagggagaagggtggtattgttaggaccctgaatgtgctagaatgctgagagggactgtcaagggtcagatgttcaagcacctcatgcataatgttaaggagcctaaagtttatccctaaagttattgaagggtttttatgttcagaaaggatatgcttaggtctgtcattctaatggattgggggaaggaggattgggagatggaagatagacgagacaagagacctagaatctatttagactctgacagtgtcccagacactggaatgaggatctgaagtagtaggaacaacgggacagagacattcggtaatatgtaagagcttcagctgaccagcctggtgatcagtttaatgtgacagagaagagggaggaagaaatatcagaatgggattttcatttcaagaatataagtactaggctcatcaccaccacatgagataga

SEQ ID NO: 192 - DNA, 1349 bp, Homo sapien
gaggtggagtctcgttctgtcgcccaggctggagtgcggtgctgagatcttggcttactgcaacctccgcctcccaggttcaagcgattctcctgcctcagcccccgagtagctgggattacaggcatccactactacacccagctaatttttttttttttaaaggcagattctcactccatcactcaggttggagtgcagtggtgtgatcttggcccagtgcaccctctctgcctcccaggtctaagcgattctcgtcatgcctcagcctcctgagtagctgggattataggcgggaccaccatgcccggctaatttttgtatttttagtagagatggggttttgctatgttggccaggctgggctcgaactcctgacctcaagtgatccagcggccttagtatcccaaaatgctgggattacaggtgtaagccactgcacctggccaagtaaaagatatttttgaaagcaccaaatattctttatgggttttaggacttccaaaaatgaggtttcaggtaaataaggaagctaaacatttcatctatctgcccattgatctcgtcctcatttctggcatgtcctcttatatgtaccaggtctgtatggtggatagacgtgcatcaatcggtgattgttaaacaataatatgtgcaaggattttcgaggtacagtgaatgtccacctaacctttaacaggactgaggaaagagggaggaggtatcttagaaaaggtcgcagtttttcctaagagtaagaaacctccaggtgctggctgtgaagagaggagaaaggaaggaacacatgagtggctgttaattttacagattgaaggagcaaaagctttgaagtgggaaataacaaggagagtggtgagcagggggagggatttgggatggtggcagggagaagggtggtattgttaggaccctgaatgtgctagaatgctgagagggactgtcaagggtcagatgttcaagcacctcatgcataatgttaaggagcctaaagtttatccctaaagttattgaagggtttttatgttcagaaaggatatgcttaggtctgtcattctaatggattgggggaaggaggattgggagatggaagatagacgagacaagagacctagaatctatttagactctgacagtgtcccagacactggaatgaggatctgaagtagtaggaacaacgggacagagacattcggtaatatgtaagagcttcagctgaccagcctggtgatcagtttaatgtgacagagaagagggaggaagaaatatcagaatgggattttcatttcaagaatataagtactaggctcatcaccaccacatgagataga

SEQ ID NO: 193 - DNA, 100 bp, Homo sapien
gtcctgcccgtgagacttaacatttttcagtaaaagaattacatggcccaccctgaagttgcgcattttggcactttggcagttttgttttgtttctgag

SEQ ID NO: 194 - DNA, 101 bp, Homo sapien
gtcctgcccgtgagacttaacatttttcagtaaaagaattacatgggcccaccctgaagttgcgcattttggcactttggcagttttgttttgtttctgag

SEQ ID NO: 195 - DNA, 103 bp, Homo sapien
  misc_feature (58)..(58): n=a, c, g or t
gtcctgcccgtgagacttaacatttttacagtaaaagaattacatgggcccaccctgnaagttggcgcattttgcactttggcagttttgttttgtttctgag

SEQ ID NO: 196 - DNA, 1011 bp, Homo sapien
gtgtaattcactgtgtagatttgtcagagagcatagctgctgaagtgaacgggccaggagaccttgataaaaatccccttgttgtatggtgcccctcccaccttttaagtgtttctctagtgaggaaactcaaagggcatgagttacctgcaaagcattttgtacttggacagtttgagagtgaaatgaggaccgtagcaccatagaacattggtgaagaaccccagctctctcctggaacattagcctttacacttgattctagcaattcaggaaaaatctgctgagaactttgtatcttcgttgcgaatttctcttccacttagcccttcactcttccccaggggtatcctgttcttaccccaggggtagtggaataaactagtccactgtttattcctcctcctctcattcctgggtgatctcagaaagcccatggcaccagctaaggccatcaccagcccatggtgatgactctcaactccatattccatgcctttctccttatatccagactcatatctgcctgcccatcccacagatatctcaggatgaacctcctccataagaccagaagtcttctgcctctccacatctgctcttcctcctgtatctcctattgcagtaaataacaatgatcactactcagtccctcaaactaaaattctgggaaccattttcagttctcccttgtctaccataaggattttgtcaccaaatctgttggttctctggatgttttccaaatccacaaagtgctatcacatctctatgccttacatgcttctccccctcccttatttttcctttatctgcctggaagatccttctcaacttccaagtgtcaacccaaatactgacttcctataaaatcatccccaatcccaaattcctgtcccccaaactaaaataagcactatgtttttaatagcaccttagacatgcttctcttctagaacccattaccttgtgttgtaatatttctgtgtttatctccccactagactgtga

SEQ ID NO: 197 - DNA, 1115 bp, Homo sapien
gtgtaattcactgtgtagatttgtcagagagcatagctgctgaagtgaacgggccaggagaccttgataaaaatccccttgttgtatggtgcccctcccaccttttaagtgtttctctagtgaggaaactcaaagggcatgagttacctgcaaagcattttgtacttggacagtttgagagtgaaatgaggaccgtagcaccatagaacattggtgaagaaccccagctctctcctggaacattagcctttacacttgattctagcaattcaggaaaaatctgctgagaactttgtatcttcgttgcgaatttctcttccacttagcccttcactcttccccaggggtatcctgttcttaccccaggggtagtggaataaactagtccactgtttattcctcctcctctcattcctgggtgatctcagaaagcccatggcaccagctaaggccatcaccagcccatggtgatgactctcaactccatattccatgcctttctccttatatccagactcatatctgcctgcccatcccacagatatctcaggatgaacctcctccataagaccagaagtcttctgcctctccacatctgctcttcctcctgtatctcctattgcagtaaataacaatgatcactactcagtccctcaaactaaaattctgggaaccattttcagttctcccttgtctaccataaggattttgtcaccaaatctgttggttctctggatgttttccaaatccacaaagtgctatcacatctctatgccttacatgcttctccccctcccttatttttcctttatctgcctggaagatccttctcaacttccaagtgtcaacccaaatactgacttcctataaaatcatccccaatcccaaattcctgtcccccaaactaaaataagcactatgtttttaatagcaccttagacatgcttctcttctagaacccattaccttgtgttgtaatatttctgtgtttatctccccactagactgtgagctccttgagggcaagtcttaacttttattcatctctggatctctagaacttggaacagtgcccagacacaggaggtgctcaataaatgttggttgaatgtaaa

SEQ ID NO: 198 - DNA, 1117 bp, Homo sapien
gtgtaattcactgtgtagatttgtcagagagcatagctgctgaagtgaacgggccaggagaccttgataaaaatccccttgttgtatggtgcccctcccaccttttaagtgtttctctagtgaggaaactcaaagggcatgagttacctgcaaagcattttgtacttggacagtttgagagtgaaatgaggaccgtagcaccatagaacattggtgaagaaccccagctctctcctggaacattagcctttacacttgattctagcaattcaggaaaaatctgctgagaactttgtatcttcgttgcgaatttctcttccacttagcccttcactcttccccaggggtatcctgttcttaccccaggggtagtggaataaactagtccactgtttattcctcctcctctcattcctgggtgatctcagaaagcccatggcaccagctaaggccatcaccagcccatggtgatgactctcaactccatattccatgcctttctccttatatccagactcatatctgcctgcccatcccacagatatctcaggatgaacctcctccataagaccagaagtcttctgcctctccacatctgctcttcctcctgtatctcctattgcagtaaataacaatgatcactactcagtccctcaaactaaaattctgggaaccattttcagttctcccttgtctaccataaggattttgtcaccaaatctgttggttctctggatgttttccaaatccacaaagtgctatcacatctctatgccttacatgcttctccccctcccttatttttcctttatctgcctggaagatccttctcaacttccaagtgtcaacccaaatactgacttcctataaaatcatccccaatcccaaattcctgtcccccaaactaaaataagcactatgtttttaatagcaccttagacatgcttctcttctagaacccattaccttgtgttgtaatatttctgtgtttatctccccactagactgtgagctccttgagggcaagtcttaacttttattcatctctggatctctagaacttggaacagtgcccagacacaggaggtgctcaataaatgttggttgaatgtatgaa

SEQ ID NO: 199 - DNA, 152 bp, Homo sapien
cttgcatattgccacttattgaccagagagaggcttctgcagggtctcacatgaataaagctaaatactttggccctaaaggtgacacttctgcacaaaactcatttcgccaaactaacttctggtccctgcaggaataaattgccagtgtc

SEQ ID NO: 200 - DNA, 467 bp, Homo sapien
gtcacatgctgatttgtttgtggggcgaatatttggtaaagatcaacaattcaaaactcttaactagggtgattatactgtaggtggcaaggtctggaaaacccttcagatcactctatacacaaaaagcttgacatgtgatcaatggaaagtgcatggctcagggtgacccagattatgccgcgggaaaaaataacctcaagtcttcatctgcaacctgaaaacaagaagggtatttttctttctcgtgttcatgtccagcacgagtttgcagggcgtgtggctcctgatccacatggaggggacagttgccatcttgcatattgccacttattgaccagagagaggcttctgcagggtctcacatgaataaagctaaatactttggccctaaaggtgacacttctgcacaaaactcatttcgccaaactaacttctggtccctgcaggaataaattgccagtgtc

SEQ ID NO: 201 - DNA, 480 bp, Homo sapien
gtcacatgctgatttgtttgtggggcgaatatttggtaaagatcaacaattcaaaactcttaactagggtgattatactgtaggtggcaaggtctggaaaacccttcagatcactctatacacaaaaagcttgacatgtgatcaatggaaagtgcatggctcagggtgacccagattatgccgcgggaaaaaataacctcaagtcttcatctgcaacctgaaaacaagaagggtatttttctttctcgtgttcatgtccagcacgagtttgcagggcgtgtggctcctgatccacatggaggggacagttgccatcttgcatattgccacttattgaccagagagaggcttctgcagggtctcacatgaataaagctaaatactttggccctaaaggtgacacttctgcacaaaactcatttcgccaaactaacttctggtccctgcaggaataaattgccagtgtctgtttttttttta

SEQ ID NO: 202 - DNA, 697 bp, Homo sapien
  misc_feature (257)..(273): n=a, c, g or t
  misc_feature (581)..(598): n=a, c, g or t
cgggtgggattattttactaaatcttacttatgtttggagatctcttttaacttaaagttacatggtctgtttcttgtttattttacctctattctttaggttgaaattttatataaagtaagatactggtatcttagtatttcctgttcatgcttagtagtttattacttcacttgagggtacttgacaatatgaacaaaaagtaaatttttatttgcataattttaagcttttgaaattaaattatctattcttnnnnnnnnnnnnnnnnngtattgtaaatccttaagtaaaattgtatttctagctattggtaagagttgtttcactattgctatgtaggactgtttaaaatgtgagtatctgatattatttaatcctccaatgtctcattttgcagtaactcctacagtgtgtaacactaaaaataagaactaatgatggctaaacactaaagtagccattcatacttatgcatattttagtatcccataatagtcaatccaaaatttttgtgactatagactttactgaagtgtcaacacattagtttgtgagcctcatgtaagaacatgatggnnnnnnnnnnnnnnnnnngtcgtgccaattataagtgcttaataaatatttgctgaatgttactaacattctagtattgattttttaaaaaaactattgtatctacagcgaaatgct

SEQ ID NO: 203 - DNA, 3171 bp, Homo sapien
gtccgggaaggcagtcgtcgccagacaagttgtaagaacgaatttaaaaatctctgcaaagacatccgagagggtcgacggtagatgtggtgattgggagctgaaaaggatttttcttccgtattcagacataatagacatgatgcaaactaaagtacagaacaagaaaaggcaagtggctttcttcattttattgatgctttggggagaggtgggttctgaatcgattcagtattccgtattggaggagacagaaagtggcacgtttgtggccaacttgacaaaggacctgggactgagggtgggggagctggcttcgcggggcgctcgggttgttttcaaagggaacagacaacatttgcagtttgatccacagacccatgatttactgctaaatgaaaaactggaccgggaggagctgtgtggctccactgagccgtgtgtgctacctttccaagtgttactggaaaaccccttgcagttttttcaggcttccttgcgagtcagagatataaatgaccacgccccggaattccctgccagagaaatgctcctgaaaatatcagaaattactatgccaggaaagatatttcctttgaaaatggcacacgatttagacaccggcagcaacggccttcagaggtacacaatcagctccaaccctcacttccacgttctcacccgcaatcgcagcgaaggcaggaagttcccggagctggtgctagacaaaccgttggaccgcgaggagcagccccaactcaggctaacgctgatcgcgctggatggcgggtctccgccccggtcagggacctccgagattcagatccaggttttggacatcaatgacaacgtccccgagtttgctcaggagctctatgaagcacaagtccctgagaacaaccccctcggctctctggttattaccgtctcagccagagatttagatgcaggatcgtttgggaaggtatcttacgccctgtttcaagtcgatgacgtcaaccaacccttcgaaataaacgcaatcacaggagaaattcggctgagaaaggctttggattttgaggaaattcagtcttatgacgtggatgttgaggctacagatggtggaggcctatcaggaaaatgctctttagtcgtcagggtcctggacgtgaatgacaatgcccctgaactcaccatgtcgttcttcatcagcctcatcccagaaaacttaccagagatcacagtggcagttttcagtgtttcagatgcagactctggacataaccaacaggttatttgttcaatagagaacaatctcccctttctactaagaccttccgtggagaatttctacaccctggtaacagaaggcgcgctggacagagagagcagagccgagtacaacatcactatcacggtcactgatttggggacaccaaggctgaaaacccagcagagcataactgtgcaggtctccgacgtcaatgacaacgtccccgccttcacccaaacctcctacaccctgttcgtccgcgagaacaacagccccgccctgcacatcggcagcgtcagcgccacagacagagactcaggcatcaacgcccaggtcacctactcgctgctgccgccccaggacccgcacctgcccctctcttccctggtctccatcaacgcggacaacggccacctgtttgccctcaggtcgctggactacgaggccctgcagtctttcgagttccgcgtgggcgccacagaccgcggctccccggcgttgagcagcgaggcgctggtgcgcttgctggtgctggacgccaacgacaactcgcccttcgtgttgtacccgctgcagaacggctccgcgccctgcaccgagctggtgccccgggcggccgagccgggctacctggtgaccaaggtggtggcggtggacggcgactcgggccagaacgcctggctgtcgtaccagctgctcaaggccacggagctcggtctgttcggcgtgtgggcgcacaatggcgaggtgcgcaccgccaggctgctgagcgagcgagacgcagccaagcacaggctggtggtgcttgtcaaggacaatggcgagcctccgcgctcggccaccgccacgctgcacgtgctcctggtggacggcttctcccagccctacctgcctctccctgaggcggccccggcccaagcccaggccgactctctcaccgtctacctggtggtggcgttggcctcggtgtcgtcgctcttcctcttttcggtgctcctgttcgtggcggtgcggctgtgcaggaggagcagggcggcctcggtgggtcgctactcggtgcccgagggtccctttccagggcatctggtggatgtgagcggcaccgggaccctatcccagagctaccagtacaaggtgtgtctgacgggaggctcagaaacaaatgagttcaagttcctgaagccgattatgcccaacttccctcctcagggcactgagagagaaatggaagaaacccccacctctcggaatagcttcccgttcagttaagtgtgggattattttactaaatcttacttatgtttggagatctcttttaacttaaagttacatggtctgtttcttgtttattttacctctattctttaggttgaaattttatataaagtaagatactggtatcttagtatttcctgttcatgcttagtagtttattacttcacttgagggtacttgacaatatgaacaaaaagtaaatttttatttgcataattttaagcttttgaaattaaattatctattcttcccccccccaaaaaaaagtattgtaaatccttaagtaaaattgtatttctagctattggtaagagttgtttcactattgctatgtaggactgtttaaaatgtgagtatctgatattatttaatcctccaatgtctcattttgcagtaactcctacagtgtgtaacactaaaaataagaactaatgatggctaaacactaaagtagccattcatacttatgcatattttagtatcccataatagtcaatccaaaatttttgtgactatagactttactgaagtgtcaacacattagtttgtgagcctcatgtaagaacatgatggtctttttttaaaaaaaaagtcgtgccaattataagtgcttaataaatatttgctgaatgttactaaca

SEQ ID NO: 204 - DNA, 952 bp, Homo sapien
  misc_feature (302)..(460): n=a, c, g or t
ggggccactgttgttagggagtggaaggaaggggagacccaggggatgggaaaccaggcccccaggctccatgtaacccacagtgattccacttttatctgctcattcatctactgaggttttagacaggattcttttagaagagaggttttattgctaaataagaagaaagttttaaaatgccaatctagagaaatggtttctgacttggattttatgcacccatgaaattaataaataggggactacctagagttagcaacttttctttcctagtaaggacactaaatagaaaccatcannnnnnnnnnnnnnnnnnnnnnnnnnnnnnnnnnnnnnnnnnnnnnnnnnnnnnnnnnnnnnnnnnnnnnnnnnnnnnnnnnnnnnnnnnnnnnnnnnnnnnnnnnnnnnnnnnnnnnnnnnnnnnnnnnnnnnnnnnnnnnnnnnnnnnnnnnnnnnnatcaggattgtaggataaacattcctcccaacatggagaacaacgtgaaaaagaagtgaaaaaaaaaatacctaactagcatacctcaaaaaaacagcatcagtacactcaagtctcatttctaatgtaaacttagaatagcaagcatataataaagatactaccataggaccaaataattgaaagagggcagaaacaatccgggcagagtggaccatattgatgaagatataatgtcaggggatcacacagcctgtctgggcagcagactaaaactgcggcttcaggttaacattaagaaattctaccagtgactaagaagctcccaggcagggactagaatctgcggcacatactaggcatactactaagaaagagggccaggtaccaccatagacaggcaccttgttgcttggtagggctaataagttaggatctgatctcctcatgtatcaccaagataaaacaggctatacaggaaccagaagcaag

SEQ ID NO: 205 - DNA, 580 bp, Homo sapien
ctcagcacctagttcccttgcttctggttcctgtatagcctgttttatcttggtgatacatgaggagatcagatcctaacttattagccctaccaagcaacaaggtgcctgtctatggtggtacctggccctctttcttagtagtatgcctagtatgtgccgcagattctagtccctgcctgggagcttcttagtcactggtagaatttcttaatgttaacctgaagccgcagttttagtctgctgcccagacaggctgtgtgatcccctgacattatatcttcatcaatatggtccactctgcctggattgtttctgccctctttcaattatttggtcctatggtagtatctttattatatgcttgctattctaagtttacattagaaatgagacttgagtgtactgatgctgtttttttgaggtatgctagttaggtattttttttttcacttctttttcacgtggttctccatgtggggaggaatgtttatcctacaatcctgatgcttccatggagaagtcagggccacctccccaaccctcttccctctcctgcttcctatcaaacataaacaaa

SEQ ID NO: 206 - DNA, 881 bp, Homo sapien
acacattacacaccttctgcatatgagggacgcgcaggtgtgggagcaagcccccgctccctggggctaacctgagtgaggggtctcacagggagagaggactgggtgaggacatagcagtcaggtatgggctgcaggagggcagggaggcgctggggacccggtggagttgagaaggatgaggctatagaaaggggcagcatggcagggaggcattggctgggcatgggctgggactggagaggccagtttctgtgggggtctcctatggaagaccagctgagctgtgcccagcaagtgaggacctgctgggacctcagggctgagaagggcctgatactgggcctttggctggggtttggggagctgcccccacccccaaaagccttagcgcctagtggcggatcctgctcccgctccactagcagcagatgatacctgtggcatggtctgcttctgactgcccgacctggggcgctgaggctgtgagagctgtgctgggctggtgggaggttccaggggcggcgatggggaggaccttgcctctttctggcctgtggcctttctcctcccccagctgctgtctggccgccccacccccaagtctctgccacaaccaaagctcctttgttgcctccccctgccccgggcctctccacctgctgctagctcaatcccctctttgtgtggttggtcttcagttgtcatggcagctgggcccaggctgaggcctgcccactgtgaggctcttaactgaactgcagcctgacccggtgcgcggagggccgggccagggccaggcgtgggaagggggcccctgtgtgtcctgctcccctcagagcccgaggggcagcagacgaggaaaggtggtccggtagggg

SEQ ID NO: 207 - DNA, 1055 bp, Homo sapien
tagggatcgctttgaccaggaagcctttttggacacaccaggcacagccaggaatcccttctctgtttaacctgtgcacctaggaccatctacatggaatcatcattgtcatcaatttgttagtctgcacaagactacatgcatcttaacacagggtccttctctctcccctgcacccagtacaggctccacacacagtaatccattaataaaaactgtcataagggaacacttaaataaaagaaatttcagtacaaaacagatttgaagcacggaagcatgaaccttcaagctgaaaggagacaactgccatctaatctcttcattttacagatgaacatgggaacagttagctgtgaagccttgggctgtcgtccgcctccaacccctggggctctgaccacacccagccccagctcagatcatcttgctcaaagggccgaaggaggacccatctccacaccttccacatgtagatatcctcaacgttcttcacagaggggatgcccgcaccccgccccaccgagttcgcggctgctgtgcccatcttcctagagaggagttctccgccacacccgacaccacacacttccaacttctgcggtgcttccctctcacttatctccacccccaatccttatccccgctcgtttaatcacacatttattggtcacctactatgtgtctgtcactctgcagcgagcattggggttcctgcccccagaaactgatctatcagggaggcgaacagggacggggaactcggaacaacgggacagcccaggagagaccgcccgcgggcgacccctctactcgccaccgcgtcctccctccattctcactagcctccctcctaacctcgctgccctggcctggcgccctccccaccctcggccgcgcccctttcccctcggctgtgtcggggcagagggaacgcttgagacccggggctcggggggcgcgcggggctcggggcaccccaggcccccgccccatccctccgccccagcccgggccgggcggaggcagcacgggaggagcggggccgggcgctc

SEQ ID NO: 208 - DNA, 1164 bp, Homo sapien
cccctaccggaccacctttcctctctgctgcccctcgggctctgaggggagcaggacacacaggggcccccttcccacgcctggccctggcccggccctccgcgcaccgggtcaggctgcagttcagttaagagcctcacagtgggcaggcctcagcctgggcccagctgccatgacaactgaagaccaaccacacaaagaggggattgagctagcagcaggtggagaggcccggggcagggggaggcaacaaaggagctttggttgtggcagagacttgggggtggggcggccagacagcagctgggggaggagaaaggccacaggccagaaagaggcaaggtcctccccatcgccgcccctggaacctcccaccagcccagcacagctctcacagcctcagcgccccaggtcgggcagtcagaagcagaccatgccacagatgaacatgggaacagttagctgtgaagccttgggctgtcgtccgcctccaacccctggggctctgaccacacccagccccagctcagatcatcttgctcaaagggccgaaggaggacccatctccacaccttccacatgtagatatcctcaacgttcttcacagaggggatgcccgcaccccgccccaccgagttcgcggctgctgtgcccatcttcctagagaggagttctccgccacacccgacaccacacacttccaacttctgcggtgcttccctctcacttatctccacccccaatccttatccccgctcgtttaatcacacatttattggtcacctactatgtgtctgtcactctgcagcgagcattggggttcctgcccccagaaactgatctatcagggaggcgaacagggacggggaactcggaacaacgggacagcccaggagagaccgcccgcgggcgacccctctactcgccaccgcgtcctccctccattctcactagcctccctcctaacctcgctgccctggcctggcgccctccccaccctcggccgcgcccctttcccctcggctgtgtcggggcagagggaacgcttgagacccggggctcggggggcgcgcggggctcggggcaccccaggcccccgccccatccctccgccccagcccgggccgggcggaggcagcacgggaggagcggggccgggcgctc

SEQ ID NO: 209 - DNA, 609 bp, Homo sapien
gggaactgcctgaggtttaaggggattaggaagaatagggcgtggcagccaccagagcgggccasmaccgcgcggcctgcattcgcggctgctgtgcccatcttcctagagaggagttctccgccacacccgacaccacacacttccaacttctgcggtgcttccctctcacttatctccacccccaatccttatccccgctcgtttaatcacacatttattggtcacctactatgtgtctgtcactctgcagcgagcattggggttcctgcccccagaaactgatctatcagggaggcgaacagggacggggaactcggaacaacgggacagcccaggagagaccgcccgcgggcgacccctctactcgccaccgcgtcctccctccattctcactagcctccctcctaacctcgctgccctggcctggcgccctccccaccctcggccgcgcccctttcccctcggctgtgtcggggcagagggaacgcttgagacccggggctcggggggcgcgcggggctcggggcaccccaggcccccgccccatccctccgccccagcccgggccgggcggaggcagcacgggaggagcggggccgggcgctc

SEQ ID NO: 210 - DNA, 880 bp, Homo sapien
cccctaccggaccacctttcctctctgctgcccctcgggctctgaggggagcaggacacacaggggcccccttcccacgcctggccctggcccggccctccgcgcaccgggtcaggctgcagttcagttaagagcctcacagtgggcaggcctcagcctgggcccagctgccatgacaactgaagaccaaccacacaaagaggggattgagctagcagcaggtggagaggcccggggcagggggaggcaacaaaggagctttggttgtggcagagacttgggggtggggcggccagacagcagctgggggaggagaaaggccacaggccagaaagaggcaaggtcctccccatcgccgcccctggaacctcccaccagcccagcacagctctcacagcctcagcgccccaggtcgggcagtcagaagcagaccatgccacaggtatcatctgctgctagtggagcgggagcaggatccgccactaggcgctaaggcttttgggggtgggggcagctccccaaaccccagccaaaggcccagtatcaggcccttctcagccctgaggtcccagcaggtcctcacttgctgggcacagctcagctggtcttccataggagacccccacagaaactggcctctccagtcccagcccatgcccagccaatgcctccctgccatgctgcccctttctatagcctcatccttctcaactccaccgggtccccagcgcctccctgccctcctgcagcccatacctgactgctatgtcctcacccagtcctctctccctgtgagacccctcactcaggttagccccagggagcgggggcttgctcccacacctgcgcgtccctcatatgcagaaggtgtgtaatgtgt

SEQ ID NO: 211 - DNA, 643 bp, Homo sapien
aagtgtgggattacaggtgtgagccatgcacctggctccaaatgttattatttaaaaagtgttaccaccttagatggcattagttgcattgtgcatagtgaaaggaaaatgaatgagcatgattgatgcacagtcccagcagaaaggaaagaagtctttctgtgcactggtcaccaggtagcattgtaggccaaatgctgcttgcttgtcaccctgcctgagtggtgccatgtagcagtacagagagagtgagtctaggggaaggcataaactggaggggctagtgaaggttttttgcttttttattttccttgaagaaagaagaaagaaagagaaggggaaaaacattttcagatttttaaggagagatgggcaaaaatgaagcagaatgaatggatccatagaacatattgaagatttacttttgtagaagggatgtgtcttcctttgaatctgcagagtggatgggaagctacctgtgttggcattttagattcaggaagtataggctgtagtagtatattaacattggattcagaaagctcacttagggatttcctttttgtagaaggaaagttttaaaataggattctagttttaaagatgatttaatattgcctttcttgtttttaaatagctgtca

SEQ ID NO: 212 - DNA, 678 bp, Homo sapien
caagcagaacgcagagctggccaagcttcggcaggagctcagcaaggtcagcaaagagctggtggcataattggagccttgctgggcactcctgtaggaggcctgctgatggcatttcagaagtactctggtgagactgttcaggaaagaaaacagaaggatcgaaaggcactccatgagctaaaactggaagagtggaaaggcagactacaagttactgagcacctccctgagaaaattgaaagtagtttacaggaagatgaacctgagaatgatgctaagaaaattgaagcactgctaaaccttcctagaaacccttcagtaatagataaacaagacaaggactgaaagtgctctgaacttgaaactcactggagagctgaagggagctgccatgtccgatgaatgccaacagacaggccactctttggtcagcctgctgacaaatttaagtgctggtacctgtggtggcagtggcttgctcttgtctttttcttttctttttaactaagaatggggctgttgtactctcactttacttatccttaaatttaaatacatacttatgtttgtattaatctatcaatatatgcatacatgaatatatccacccacctagattttaagcagtaaataaaacatttcgcaaaagattaaagttgaattttacagttcgta

SEQ ID NO: 213 - DNA, 1791 bp, Homo sapien
tgagacagattttcgctcttgttgcccaggctgcagtgcagtggtgtgatctcggctcactgcaacctccgcctcccgggttcaagcgattctcctacctcagcctcccgagtagctaggattacaggcgcccgccaccatgcccggctaattcctggcattttaaatacgataaattacttcaacctatgaccacctcaagctgaatataagtagccgcagacaccgtttgcatgacccaggaaccacaaacacggagcgaaggcctgccgggaccacgctgagcttcactactggcagccaactcacttccgggggtgcactcagcacagcagtggcccaacccgccctcaaccggaagtcttttgggctccggcttcgccgtcgccccgccccctggcctttgccccggtcgggcgggacttcctgtgtcgtatttccaaggactccaaagcgaggccggggactgaaggtgtgggtgtcgagccctctggcagagggttaacctgggtcaaatgcacggattctcacctcgtacagttacgctctcccgcggcacgtccgcgaggacttgaagtcctgagcgctcaagtttgtccgtaggtcgagagaaggccatggaggtgccgccaccggcaccgcggagctttctctgtagagcattgtgcctatttccccgagtctttgctgccgaagctgtgactgccgattcggaagtccttgaggagcgtcagaagcggcttccctacgtcccagagccctattacccggaatctggatgggaccgcctccgggagctgtttggcaaagatgaacagcagagaatttcaaaggaccttgctaatatctgtaagacggcagctacagcaggcatcattggctgggtgtatgggggaataccagcttttattcatgctaaacaacaatacattgagcagagccaggcagaaatttatcataaccggtttgatgctgtggtatgtactggtgatctaaagaaatttggggcacactgacttagtaattcactttacacttaatcattcaattaggttgtggggatggagggttgttttaaggtgtcagagtaaagaaataaagtctgtacttaataacagtggaagtactaatgttaaagtgcctgcatgttgtttgagagactactttgttatcttcagaacaggcatgtttggcatcaccactgtggcttttctttctcaaatacatttcttccaatcccctgctaaatcgtcaaggctcagctgtaacatatttacctcattcacaaagcctccatgagtataggagctcacactaaagcaatagttaacatttataactttatagagtgctaactcgtttgttacatcattagatctgtacatcagttcttttgtgagaatattaaagctcagagaatttttaactttttattttgaaattatagcaggcttgaaagttgcaaaactagtacaaagatttcctatatacctttcatccggattctccattgttaacattttaccatgtttgttttatcattctccctctgtataatatgtactaatttgttctgagctacttgacagtaggttatagacatgatgaatacttcagtgtgttatttcctaaaaacaaggaaattctcttatacaaccacaattataatatcaagatcaggaaattaacacagatatagtactattatcttatttaaagacctgtaaattttgctagttatcccacagtatcatttattttaaaaataaataaaaaaatgtatttttcaga

SEQ ID NO: 214 - DNA, 1425 bp, Homo sapien
atccaactcacaaattcttcctatttctaggggtgtaatagtcatcaaaagcaccttttaaaaaactttttattggagtaggaaatgcatttcgaaaaatgtgcctaagtatactgatggatgaattttcacaaactgaacatagctgtacccagcactaagaaagaaatggcaactattgtaacatcccaaaagctccccttgtgccttttccggtcattgtcttttcaggagttgccactatcctaattctaacaccatagcttcgttttgtctgagactacgttccttttaatataactgaactgtttaattcatctgagaattctacctatgatgaaaaatgttgtggtggtagcatttgggttaattctgattatagagtctcttggagagcaatgtccataaactaatcccaaacaacattgtctttttgatgttgtagtgaacagcagagaatttcaaaggaccttgctaatatctgtaagacggcagctacagcaggcatcattggctgggtgtatgggggaataccagcttttattcatgctaaacaacaatacattgagcagagccaggcagaaatttatcataaccggtttgatgctgtggtatgtactggtgatctaaagaaatttggggcacactgacttagtaattcactttacacttaatcattcaattaggttgtggggatggagggttgttttaaggtgtcagagtaaagaaataaagtctgtacttaataacagtggaagtactaatgttaaagtgcctgcatgttgtttgagagactactttgttatcttcagaacaggcatgtttggcatcaccactgtggcttttctttctcaaatacatttcttccaatcccctgctaaatcgtcaaggctcagctgtaacatatttacctcattcacaaagcctccatgagtataggagctcacactaaagcaatagttaacatttataactttatagagtgctaactcgtttgttacatcattagatctgtacatcagttcttttgtgagaatattaaagctcagagaatttttaactttttattttgaaattatagcaggcttgaaagttgcaaaactagtacaaagatttcctatatacctttcatccggattctccattgttaacattttaccatgtttgttttatcattctccctctgtataatatgtactaatttgttctgagctacttgacagtaggttatagacatgatgaatacttcagtgtgttatttcctaaaaacaaggaaattctcttatacaaccacaattataatatcaagatcaggaaattaacacagatatagtactattatcttatttaaagacctgtaaattttgctagttatcccacagtatcatttattttaaaaataaataaaaaaatgtatttttcaga

SEQ ID NO: 215 - DNA, 1439 bp, Homo sapien
atccaactcacaaattcttcctatttctaggggtgtaatagtcatcaaaagcaccttttaaaaaactttttattggagtaggaaatgcatttcgaaaaatgtgcctaagtatactgatggatgaattttcacaaactgaacatagctgtacccagcactaagaaagaaatggcaactattgtaacatcccaaaagctccccttgtgccttttccggtcattgtcttttcaggagttgccactatcctaattctaacaccatagcttcgttttgtctgagactacgttccttttaatataactgaactgtttaattcatctgagaattctacctatgatgaaaaatgttgtggtggtagcatttgggttaattctgattatagagtctcttggagagcaatgtccataaactaatcccaaacaacattgtctttttgatgttgtagtgaacagcagagaatttcaaaggaccttgctaatatctgtaagacggcagctacagcaggcatcattggctgggtgtatgggggaataccagcttttattcatgctaaacaacaatacattgagcagagccaggcagaaatttatcataaccggtttgatgctgtgcaatctgcacatcgtgctgccacacgaggcttcattcgttatggctggcgctggggttggagaactgcagtgtttgtgactatattcaacacagtgaacactagtctgaatgtataccgaaataaagatgccttaagccattttgtaattgcaggagctgtcacgggaagtctttttaggataaacgtaggcctgcgtggcctggtggctggtggcataattggagccttgctgggcactcctgtaggaggcctgctgatggcatttcagaagtactctggtgagactgttcaggaaagaaaacagaaggatcgaaaggcactccatgagctaaaactggaagagtggaaaggcagactacaagttactgagcacctccctgagaaaattgaaagtagtttacaggaagatgaacctgagaatgatgctaagaaaattgaagcactgctaaaccttcctagaaacccttcagtaatagataaacaagacaaggactgaaagtgctctgaacttgaaactcactggagagctgaagggagctgccatgtccgatgaatgccaacagacaggccactctttggtcagcctgctgacaaatttaagtgctggtacctgtggtggcagtggcttgctcttgtctttttcttttctttttaactaagaatggggctgttgtactctcactttacttatccttaaatttaaatacatacttatgtttgtattaatctatcaatatatgcatacatgaatatatccacccacctagattttaagcagtaaataaaacatttcgcaaaagattaaagttgaattttacagttcgta

SEQ ID NO: 216 - DNA, 1290 bp, Homo sapien
tgtagatttataattcattacaggttgagcagcacaaatctgaaatcctgaatgctcagattcaaaactttttgagcattgacacgtcattcaaaggaattgctcattggagcatttcagatttcggttttttggatttgggatgctcaaccagtaagtgttaaaagcgcatattcccaaatctgaaaaaatcctaaatccaagtatcagataagggatctggtctcaagtatcagataagggatactcaaccattttttcatctcctgataggataggctacacatggaacttttacgtaagcctcaatacttaaagaatagtatttctagagattttctagtatttctatctgtttgggtgtacctgactaatccatagctaaaattcctctaccgcagttctagaataaggaaaatatgatggtgtcttagaacctcacagttttttaattaactttagcaatctgcacatcgtgctgccacacgaggcttcattcgttatggctggcgctggggttggagaactgcagtgtttgtgactatattcaacacagtgaacactagtctgaatgtataccgaaataaagatgccttaagccattttgtaattgcaggagctgtcacgggaagtctttttaggataaacgtaggcctgcgtggcctggtggctggtggcataattggagccttgctgggcactcctgtaggaggcctgctgatggcatttcagaagtactctggtgagactgttcaggaaagaaaacagaaggatcgaaaggcactccatgagctaaaactggaagagtggaaaggcagactacaagttactgagcacctccctgagaaaattgaaagtagtttacaggaagatgaacctgagaatgatgctaagaaaattgaagcactgctaaaccttcctagaaacccttcagtaatagataaacaagacaaggactgaaagtgctctgaacttgaaactcactggagagctgaagggagctgccatgtccgatgaatgccaacagacaggccactctttggtcagcctgctgacaaatttaagtgctggtacctgtggtggcagtggcttgctcttgtctttttcttttctttttaactaagaatggggctgttgtactctcactttacttatccttaaatttaaatacatacttatgtttgtattaatctatcaatatatgcatacatgaatatatccacccacctagattttaagcagtaaataaaacatttcgcaaaagattaaagttgaattttacagttcgta

SEQ ID NO: 217 - DNA, 750 bp, Homo sapien
ttggatagctgttctagaggatcccagtgtcatgtataccgaaataaagatgccttaagccattttgtaattgcaggagctgtcacgggaagtctttttaggataaacgtaggcctgcgtggcctggtggctggtggcataattggagccttgctgggcactcctgtaggaggcctgctgatggcatttcagaagtactctggtgagactgttcaggaaagaaaacagaaggatcgaaaggcactccatgagctaaaactggaagagtggaaaggcagactacaagttactgagcacctccctgagaaaattgaaagtagtttacaggaagatgaacctgagaatgatgctaagaaaattgaagcactgctaaaccttcctagaaacccttcagtaatagataaacaagacaaggactgaaagtgctctgaacttgaaactcactggagagctgaagggagctgccatgtccgatgaatgccaacagacaggccactctttggtcagcctgctgacaaatttaagtgctggtacctgtggtggcagtggcttgctcttgtctttttcttttctttttaactaagaatggggctgttgtactctcactttacttatccttaaatttaaatacatacttatgtttgtattaatctatcaatatatgcatacatgaatatatccacccacctagattttaagcagtaaataaaacatttcgcaaaagattaaagttgaattttacagttcgta

SEQ ID NO: 218 - DNA, 1543 bp, Homo sapien
ctcattcttccgctgaggctagagtgcaggagtgtgatatctgctcactgcagcctccgcctctggggttcaaacaattcttgtgcctccgcctcctgagtagctgggattacaggcgtgcaccacaatacccagctaatttttgtatctttagtagaggcagggttttgccatgttgtccaggctgacttagaactcctgacctcaagtgatccgcctgccttggcctcccaaagtgttgggattacaggtgtgagccattgcacctggcttcaaatgttattatttaaaaagtgttaccaccttagatggcattagttgcattgtgcatagtgaaaggaaaatgaatgagcatgattgatgcacagtcccagcagaaaggaaagaagtctttctgtgcactggtcaccaggtagcattgtaggccaaatgctgcttgcttgtcaccctgcctgagtggtgccatgtagcagtacagagagagtgagtctaggggaaggcataaactggaggggctagtgaaggttttttgcttttttattttccttgaagaaagaagaaagaaagagaaggggaaaaacattttcagatttttaaggagagatgggcaaaaatgaagcagaatgaatggatccatagaacatattgaagatttacttttgtagaagggatgtgtcttcctttgaatctgcagagtggatgggaagctacctgtgttggcattttagattcaggaagtataggctgtagtagtatattaacattggattcagaaagctcacttagggatttcctttttgtagaaggaaagttttaaaataggattctagttttaaagatgatttaatattgcctttcttgtttttaaatagctgtcacgggaagtctttttaggataaacgtaggcctgcgtggcctggtggctggtggcataattggagccttgctgggcactcctgtaggaggcctgctgatggcatttcagaagtactctggtgagactgttcaggaaagaaaacagaaggatcgaaaggcactccatgagctaaaactggaagagtggaaaggcagactacaagttactgagcacctccctgagaaaattgaaagtagtttacaggaagatgaacctgagaatgatgctaagaaaattgaagcactgctaaaccttcctagaaacccttcagtaatagataaacaagacaaggactgaaagtgctctgaacttgaaactcactggagagctgaagggagctgccatgtccgatgaatgccaacagacaggccactctttggtcagcctgctgacaaatttaagtgctggtacctgtggtggcagtggcttgctcttgtctttttcttttctttttaactaagaatggggctgttgtactctcactttacttatccttaaatttaaatacatacttatgtttgtattaatctatcaatatatgcatacatgaatatatccacccacctagattttaagcagtaaataaaacatttcgcaaaagattaaagttgaattttacagttcgta

SEQ ID NO: 219 - DNA, 1478 bp, Homo sapien
ctcattcttccgctgaggctagagtgcaggagtgtgatatctgctcactgcagcctccgcctctggggttcaaacaattcttgtgcctccgcctcctgagtagctgggattacaggcgtgcaccacaatacccagctaatttttgtatctttagtagaggcagggttttgccatgttgtccaggctgacttagaactcctgacctcaagtgatccgcctgccttggcctcccaaagtgttgggattacaggtgtgagccattgcacctggcttcaaatgttattatttaaaaagtgttaccaccttagatggcattagttgcattgtgcatagtgaaaggaaaatgaatgacattgtaggccaaatgctgcttgcttgtcaccctgcctgagtggtgccatgtagcagtacagagagagtgagtctaggggaaggcataaactggaggggctagtgaaggttttttgcttttttattttccttgaagaaagaagaaagaaagagaaggggaaaaacattttcagatttttaaggagagatgggcaaaaatgaagcagaatgaatggatccatagaacatattgaagatttacttttgtagaagggatgtgtcttcctttgaatctgcagagtggatgggaagctacctgtgttggcattttagattcaggaagtataggctgtagtagtatattaacattggattcagaaagctcacttagggatttcctttttgtagaaggaaagttttaaaataggattctagttttaaagatgatttaatattgcctttcttgtttttaaatagctgtcacgggaagtctttttaggataaacgtaggcctgcgtggcctggtggctggtggcataattggagccttgctgggcactcctgtaggaggcctgctgatggcatttcagaagtactctggtgagactgttcaggaaagaaaacagaaggatcgaaaggcactccatgagctaaaactggaagagtggaaaggcagactacaagttactgagcacctccctgagaaaattgaaagtagtttacaggaagatgaacctgagaatgatgctaagaaaattgaagcactgctaaaccttcctagaaacccttcagtaatagataaacaagacaaggactgaaagtgctctgaacttgaaactcactggagagctgaagggagctgccatgtccgatgaatgccaacagacaggccactctttggtcagcctgctgacaaatttaagtgctggtacctgtggtggcagtggcttgctcttgtctttttcttttctttttaactaagaatggggctgttgtactctcactttacttatccttaaatttaaatacatacttatgtttgtattaatctatcaatatatgcatacatgaatatatccacccacctagattttaagcagtaaataaaacatttcgcaaaagattaaagttgaattttacagttcgta

SEQ ID NO: 220 - DNA, 1317 bp, Homo sapien
ttctttaaccatctgtcagtgaacatttatgttgcttccacttagcaaaaatagttattagtatgaggttacttaaattgtagctggaggaaatttaaggtgtatgaaggtcaaatacttctagtctgagaacacaagaaccaaactctcttcatcactataataattattatctaaatcagtttctcaatgggttgctattggcattgtgggtgagacagttacgccagactcttgaacttcaggatattttggtggtcccacccccaaaagccagtagcatccctccctcaaccagaaatgccctccacatttcctgtctcctagaggagctggtgccattctgaactagaaatttcatttttgagaaatctttggtgtggggctacttactagaacttgtcataaatatatatatttttcctctttgttttgatttatttctcattcctcataaaaacagccagtttctagatctgttgttttattatatatcagttaactttaggaggttgtagtgattgtttttgtctgttgttcagaccaaggaagagattacctcaatgtttttctttatttgacaaggacactttaattctcaaatgttcctgtacctaatagtgaacaagtggctctggtgttgctcacaccttagcagagaatctcacatgttgcaaggtctaatgactcgtttttcctaagctttccctctcctttcttctcagcactcctgtaggaggcctgctgatggcatttcagaagtactctggtgagactgttcaggaaagaaaacagaaggatcgaaaggcactccatgagctaaaactggaagagtggaaaggcagactacaagttactgagcacctccctgagaaaattgaaagtagtttacaggaagatgaacctgagaatgatgctaagaaaattgaagcactgctaaaccttcctagaaacccttcagtaatagataaacaagacaaggactgaaagtgctctgaacttgaaactcactggagagctgaagggagctgccatgtccgatgaatgccaacagacaggccactctttggtcagcctgctgacaaatttaagtgctggtacctgtggtggcagtggcttgctcttgtctttttcttttctttttaactaagaatggggctgttgtactctcactttacttatccttaaatttaaatacatacttatgtttgtattaatctatcaatatatgcatacatgaatatatccacccacctagattttaagcagtaaataaaacatttcgcaaaagattaaagttgaattttacagttcgta

SEQ ID NO: 221 - DNA, 276 bp, Homo sapien
caaacgaaaaatttgataacttcatctttgataactgcttcatatgtagttattaccaacttctggtgattttgcctccaaaatatatcccaaagccattcatgttttgtcatcctcactgttagcaccctggtctaaacctaaactactatagtaacttttttcctaacaagtctctccacttctacttttgcttcccaagtcattttttatatttcagtcacagtgatctatttaaaacacaaatctggctgggcactgtggctcacgcctgta

SEQ ID NO: 222 - DNA, 276 bp, Homo sapien
caaacgaaaaatttgataacttcatctttgataactgcttcatatgtagttattaccaacttctggtgattctgcctccaaaatatatcccaaagccattcatgttttgtcatcctcactgttagcaccctggtctaaacctaaactactatagtaacttttttcctaacaagtctctccacttctacttttgcttcccaagtcattttttatatttcagtcacagtgatctatttaaaacacaaatctggctgggcactgtggctcacgcctgta

SEQ ID NO: 223 - DNA, 767 bp, Homo sapien
gtgctcctccagggactgggaccagcggcagttgccctcccgtcagtcacccgccaactcctctgcaaacgtttatccagttcccagcgggggctgctctgccccaggaccgggctcactcgggagcgccaggaaggaatgtcagtgtgggaaggcagtagacggggcagaggagaccttgggccaacctggagccccatccacattgagggaccccagtacagccacgtgaggagtgcccacacggattccgcccacctccagggcatccacatgcccaccgcccacgccagcaggccgcctggtgagccccgcagcctcacccacgtggggaggggctgctgaggcctccttgcctttcttggtgggcgccctacgcctcgggggtcctaccctcctcttctgtgcagccccaacgtggctttgcccccttctccaaacttctgccttgggccatggggcgcaggccgtggggatgctgtctgcctgctttagagaaacctggggcaccgatgacaaatacaggctctgcttggcctgtgggacggttgcatcctgggccttccggtggtgtcaggagactccaggcccttgaaaggcagctgcgaccccgggtatgactcggagaagtccaggagcaggaaatgggctgcattccttcggggcccctccgtgcaccccagcccctccctgggagagctgccctgaggtcaggaaagtgccgtcctggcaagaccctcagcagccgccgcccacaggacagtcag

SEQ ID NO: 224 - DNA, 603 bp, Homo sapien
gtgctcctccagggactgggaccagcggcagttgccctcccgtcagtcacccgccaactcctctgcaaacgtttatccagttcccagcgggggctgctctgccccaggaccgggctcactcgggagcgccaggaaggaatgtcagtgtgggaaggcagtagacggggcagaggagaccttgggccaacctggagccccatccacattgagggaccccagtacagccacgtgaggagtgcccacacggattccgcccacctccagggcatccacatgcccaccgcccacgccagcaggccgcctggtgagccccgcagcctcacccacgtggggaggggctgctgaggcctccttgcctttsttggtgggcgccctacgcctcgggggtcctaccctcctcttctgtgcagccccaacgtggctttgcccccttctccaaacttctgccttgggccatggggcgcaggccgtggggatgctgtctgcctgctttagagaaacctggggcaccgatgacmaatacaggctctgcttggcctgtgggacggttgctcccgatggcttgggggggttctccgcagcagcgaggccacagccggctcc

SEQ ID NO: 225 - DNA, 663 bp, Homo sapien
ggcgccgtgaggcgggcagtccccggggaggggggagggggtgtgggccccggcccaccccaccccagggaatgcaggggagagggcctgggcctggccttgctgctggtcccctggggacttctgagggcccgcgggggtccctgggtcacagtgcagccacactggcctstgggctsctttcatccacaggccgcctggtgagccccgcagcctcacccacgtggggaggggctgctgaggcctccttgcctttsttggtgggcgccctacgcctcgggggtcctaccctcctcttctgtgcagccccaacgtggctttgcccccttctccaaacttctgccttgggccatggggcgcaggccgtggggatgctgtctgcctgctttagagaaacctggggcaccgatgacmaatacaggctctgcttggcctgtgggacggttgcatcctgggccttccggtggtgtcaggagactccaggcccttgaaaggcagctgcgaccccgggtatgactcggagaagtccaggagcaggaaatgggctgcattccttcggggcccctccgtgcaccccagcccctccctgggagagctgccctgaggtcaggaaagtgccgtcctggcaagaccctcagcagccgccgcccacaggacagtcag

SEQ ID NO: 226 - DNA, 1032 bp, Homo sapien
cataaaactgcttaaaagacagcatcccttgaagttcaataaaggaataaagcaatctgttcaactggttttaaaataacactttaaaaagcctttttaaaaatgaaaaagtcaaaatccattacatttccatatttggcaaattcagcgtctacagtttcaccgaagagtgtttgacctatttatttgtcactgagaccacttcacagtgaagggattgttagttcctgcaaaactgagaaaaatccaatgtgcatagcgcatttgcagatggaaacagactgtgtagccggatttggagggtgggttggctggaagctttgtgttaacaactggtgaaaagcttgacctttgcgtgacctaggtcaaacaaacccccaactcaagagctctcctttgacatggatacctgtttggggaaggggccaaaaaagggaatggagataaaattatgttatggacttgcaagcttactttttaaaaagttctagttaacttgactgtttggggacatggtggccattttagggtgttataaaggaccacaaatctgtttgtaagtgtcaaagggaaagggtgatagggagacctttcttatactttctttcaatgattcaagccatgcataggttttttcccccattgcaatatgatctgggttgtgattcacagagttgaatgaatgggctgaactccactgatgaaaacatttgataatgtgtaaaataaaagccctggcaaggaggagatggcaaagcttccattgtttgtccccacactttgtttttataggggattctcacaggaacaaataaattggagtaaataaaagcaaaatagcactgttagtccatatcgggactttgcacatgctcacaagtcaactttggcaggaaactagcaaaggtctgttccctaccatttgcgttgcatctttatctctccggttcattgtttgccactgagtgcttaaacctcaacttcccaagtaaaagcttcctgttgcttgcttttaaatatagttttgttaca

SEQ ID NO: 227 - DNA, 1035 bp, Homo sapien
gcataaaactgcttaaaagacagcatcccttgaagttcaataaaggaataaagcaatctgttcaactggttttaaaataacactttaaaaagcctttttaaaaatgaaaaagtcaaaatccattacatttccatatttggcaaattcagcgtctacagtttcaccgaagagtgtttgacctatttatttgtcactgagaccacttcacagtgaagggattgttagttcctgcaaaactgagaaaaatccaatgtgcatagcgcatttgcagatggaaacagactgtgtagccggatttggagggtgggttggctggaagctttgtgttaacaactggtgaaaagcttgacctttgcgtgacctaggtcaaacaaacccccaactcaagagctctcctttgacatggatacctgtttggggaaggggccaaaaaagggaatggagataaaattatgttatggacttgcaagcttactttttaaaaagttctagttaacttgactgtttggggacatggtggccattttagggtgttataaaggaccacaaatctgtttgtaagtgtcaaagggaaagggtgatagggagacctttctttttttctttctttcaatgattcaagccatgcataggttttttcccccattgcaatatgatctgggttgtgattcacagagttgaatgaatgggctgaactccactgatgaaaacatttgataatgtgtaaaataaaagccctggcaaggaggagatggcaaagcttccattgtttgtccccacactttgtttttataggggattctcacaggaacaaataaattggagtaaataaaagcaaaatagcactgttagtccatatcgggactttgcacatgctcacaagtcaactttggcaggaaactagcaaaggtctgttccctaccatttgcgttgcatctttatctctccggttcattgtttgccactgagtgcttaaacctcaacttcccaagtaaaagcttcctgttgcttgcttttaaatatagttttgttaca

SEQ ID NO: 228 - DNA, 520 bp, Homo sapien
atctggattcttgttgcttttagcacgttttccaattggagagtcctccagtttgtttttccttttcaaaatgatcttcactctgctgggacctttacatttctgtataaaattttaagatcagtttgccaacttctgcaacaacaacaaaagaaggctgctggaatgttgatggaggtgcgttgaacccctctggagagaatgtccagatgaaatcttaccaacactgaggcctccatctcatgaacacagaagcatctctccatttaggtagagttcttactttatcaccagcgtcttgttcctttcagcacacatcttgcacttctttgtgaaagctattaatacataataatgttatttattagatattgaattataattattttattaattatttctaaatgctgataaatttgtttattctttttatgccatcatgagtagaattttcttaacttcatttcagaggttgccgtagactacaattgatttttacatattgacctcatttcctttg

SEQ ID NO: 229 - DNA, 298 bp, Homo sapien
  misc_feature (284)..(284): n=a, c, g or t
ggctctgaaaatctctccaagtagaaggcatggcgcccactttcacaaagaagtgcaagatgtgtgctgaaaggaacaagacgctggtgataaagtaagaactctacctaaatggagagatgcttctgtgttcatgagatggaggcctcagtgttggtaagatttcatctggacattctctccagaggggttcaacgcacctccatcaacattccagcagccttcttttgttgttgttgcagaagttggcaaactgatcttaaaattttatacagaatgtaaanggccccagcagagt

SEQ ID NO: 230 - DNA, 521 bp, Homo sapien
caaaggaaatgaggtcaatatgtaaaaatcaattgtagtctacggcaacctctgaaatgaagttaagaaaattctactcatgatggcataaaaagaataaacaaatttatcagcatttagaaataattaataaaataattataattcaatatctaataaataacattattatgtattaatagctttcacaaagaagtgcaagatgtgtgctgaaaggaacaagacgctggtgataaagtaagaactctacctaaatggagagatgcttctgtgttcatgagatggaggcctcagtgttggtaagatttcatctggacattctctccagaggggttcaacgcacctccatcaacattccagcagccttcttttgttgttgttgcagaagttggcaaactgatcttaaaattttatacagaaatgtaaaggtcccagcagagtgaagatcattttgaaaaggaaaaacaaactggaggactctccaattggaaaacgtgctaaaaggcaacaagaatccagat

SEQ ID NO: 231 - DNA, 298 bp, Homo sapien
ggctctgaaaatctctccaagtagaaggcatggcgcccactttcacaaagaagtgcaagatgtgtgctgaaaggaacaagacgctggtgataaagtaagaactctacctaaatggagagatgcttctgtgttcatgagatggaggcctcagtgttggtaagatttcatctggacattctctccagaggggttcaacgcacctccatcaacattccagcagccttcttttgttgttgttgcagaagttggcaaactgatcttaaaattttatacagaaatgtaaaggtcccagcagagt

SEQ ID NO: 232 - DNA, 441 bp, Homo sapien
caaaggaaatgaggtcaatatgtaaaaatcaattgtagtctacggcaacctctgaaatgaagttaagaaaattctactcatgatggcataaaaagaataaacaaatttatcagcatttagaaataattaataaaataattataattcaatatctaataaataacattattatgtattaatagctttcacaaagaagtgcaagatgtgtgctgaaaggaacaagacgctggtgataaagtaagaactctacctaaatggagagatgcttctgtgttcatgagatggaggcctcagtgttggtaagatttcatctggacattctctccagaggggttcaacgcacctccatcaacattccagcagccttcttttgttgttgttgcagaagttggcaaactgatcttaaaattttatacagaaatgtaaaggtcccagcagagt

SEQ ID NO: 233 - DNA, 479 bp, Homo sapien
atctggattcttgttgcttttagcacgttttccaattggagagtcctccagttttgtttttccttttcaaaatgatcttcactctgctgggacctttacatttctgtataaaattttaagatcagtttgccaacttctgcaacaacaacaaaagaaggctgctggaatgttgatggaggtgcgttgaacccctctggagagaatgtccagatgaaatcttaccaacactgaggcctccatctcatgaacacagaagcatctctccatttaggtagagttcttactttatcaccagcgtcttgttcctttcagcacacatcttgcacttctttgtgaaagctattaatacataataatgttatttattagatattgaattataattattttattaattatttctaaatgctgataaatttgtttattctttttatgccatcatgagtagaattttcttaacttcatttcagaggttgccg

SEQ ID NO: 234 - DNA, 846 bp, Homo sapien
tgaagatcttgctacctcaccatcatggaaagggttaaaagatacttttacaacttctgagtttattaactcaaagaaccaggtttaaaagtctctgtcttcttcctttcaaatgcatcatcttattcattaaaaattatttctcccaaattcttattaaagatttctaaacagggagatgacattatctgatgcatacttgggtagatgactgatggcaatgtggaaatggatcaaagggtggagcttggagaatggtgattaccatacgccatgtgagaaataataggattctagatcacgcccatagcaccagggctgaaaaggaagaaacatagacaaattagaaggatataggatatggatggtggggtcaggagaggagtggacagtaatttgattgtttcatcttggatgacaaagggatggatgttggatttattgagagattgtattagaggacgatgagcaattatagaaaaaaataaatttaattttaaataaattgaatttaagttatctatagagcatacagaaggagatttttaatgcagaattaagagtatcagtctgggttcaggagaatggccagggctagaggaaatctagggataatagctgaaatacatgaagcaagaagccaagagaacagagtatgtacagaaaattggagaagaccaataattaaagtatggacagagaaagaagagtcaatggaaaaaagttaaaataagtcattagaaagatagaaagaggataagtatttctggtaagtttaaaaaggagagtatttcaaggaattatttattagtgacagatattgtgggttcaatgaagaggttggta

SEQ ID NO: 235 - DNA, 847 bp, Homo sapien
tgaagatcttgctacctcaccatcatggaaagggttaaaagatacttttacaacttctgagtttattaactcaaagaaccaggtttaaaagtctctgtcttcttcctttcaaatgcatcatcttattcattaaaaattatttctcccaaattcttattaaagatttctaaacagggagatgacattatctgatgcatacttgggtagatgactgatggcaatgtggaaatggatcaaagggtggagcttggagaatggtgattaccatacgccatgtgagaaataataggattctagatcacgcccatagcaccagggctgaaaaggaagaaacatagacaaattagaaggatataggatatggatggtggggtcaggagaggagtggacagtaatttgattgtttcatcttggatgacaaagggatggatgttggatttattgagagattgtattagaggacgatgagcaattatagaaaaaaataaatttaattttaaataaattgaatttaagttatctatagagcatacagaaggagatttttaatgcagaattaagagtatcagtctgggttcaggagaatggccagggctagaggaaatctagggataatagctgaaatacatgaagcaagaagccaagagaacagagtatgtacagaaaattggagaagaccaataattaaagtatggacagagaaagaagagtcaatggaaaaaagttaaaataagtcattagaaagatagaaagaggataagtatttctggtaagtttaaaaaggagagtatttcaaggaattatttattagtgacagatattgtgggttcaatgaagagttggtaag

SEQ ID NO: 236 - DNA, 701 bp, Homo sapien
aaataatacactgaaatgtatatattgagaagtatacatttgcttattttgctgagacataattgatcactttcgtgatttattttgtaaagtattttaatagaattctgtattttaaaacttctcttcctgcttctatgaaatttgaatgtgtatttcccctagaggactctggcaaggtctcttagcagactcagatgatcccatttctattgtcttgccctcatctggctacggagcaccttgcacaacccaagccttcatttctggatgcagtcgatgtgtgtcactgaaactgcttaaacagtggagtggagagccattggcaccctttgaagccacggtgtactctgtcacaaatccaaagaacatcctgcctgtgttcataaaggaagcactcaagaggagtaagcaatgtcatgaaaccaagaggatacaagggatttaattatcttcccagtgaactgtgtaatcatgcagcttccttccaaatttaaccagtgactcttgaaatcagagtattaagtgactagtgtcagtgctgggctcctgtgtgccttcattggtttaacagcagggaagttggctgtattatggtactctcgaatgctgtttacacagtgttttatacttgcaaaggactttacggaatgtcatggcagtcttagagaaaggtggagaagtcctgacagggggtgtag

SEQ ID NO: 237 - DNA, 1884 bp, Homo sapien
gataagaggattggttggttctgtgagctcacactgagagataagctggtacctagttaacaatgggcattaacaaatgccccagagcaagttgatagttaaggatgtagaaaagagttctgagagtatcctataaacctccactggcccatatgcacctttgtggagttagaaacaggtagccctccagaagggcacagagctgagggagacttcgtgaaaatgagaaaaatggagtggaagcagcccagagccaggtgcaggcataaaaccatggaaagcagaccagatgttggttcctacttccctccttgcccagggcacaacctgaacagctacctgtggcatccctgcttaggcagacctctgggataagagtaaatttacagaccaggatctaatcctattatagccgccaactgtgtgccctcagtttcttcatctgtaaaaagacagagtttgacttcatagcctttgaaatataactgcttgaatatacttgctattttaccgcagtttggctctgtctctctctctctctttgtgtgtgtgtgtatgtgtgaaagagaaagagagagagagaaagagagagaaagagaaagagatgccttgtagtacttgaaaattagaattcttgataaaataaagctctaatttgttctagtgtttcttttcaacaaaccaggggttgccaagttttaaaacattttaaaatgcattagaggaagtgagtcagttacgttcttcatacactacaatggaagtacacttagttccaagttatgaatgctgtgaaaaattaggttcttttaataaatacaagatgaaactttcaggctttcaaaattcatgttctttctttccctccttattcatattagattgcttttgtaaagtatacagcactgcgatcttaaaaatgagcttttcgaaaataaaaatccaagtgcctatctcttgcatttccagttggtagtttcctatcatcgggtttgcctgttcacacaagtctttgcggcacaacggagtctgacttcccccaaattaatgcagttagtttattcctcgttctgatgattgccatatatagagaaagatctaattatttttatgtggcactattcctcatttatttcttggggactatgagtgatttagttaactccaccaagggaagtgtaagatgagcctcctcagggtggctgaattctattcgagagcatcacagggaggtggggaatagttgacgtgtgctgagataaactcttttacaagtatgacactgttgctttatttttttgccccagtctgcagggtgaaaaggacttttcatttcactgaggtgaaaagtgggtctgtgagtagagcgactttctttaaaaaaaaaaaaaaaaatcagaaaccaattacttgatatgcagagctgcaagcctcgttcctttaacaaaatcagtgcagtgtgcactgccgttaacctgaggaaagcagctgacatctcttgattacggctagaggtggaaggacccaaacttgcagcctccccctccccctcgagagagtgttagtccagtcctttagagaggttcggtttggctctctgtcatcaccgggacgctggcagggagtgtgtgtcatggttacaatagagtgtgctaacatataacaaccatgaaagcccagcgggaaaggctacagattccggggctgaccttggatctcactcccaggagcctgagtccaaccccatccagcccaggcagtccttgtagtcctctcttggcctttcacttttggagccctgtgtgtccaaatgctgggagaacatcaccccttggatgaattgccaccacattaaataaaacatatccaaagctcaaaaaaaaa

SEQ ID NO: 238 - DNA, 293 bp, Homo sapien
ctgcatgaatttggctcgaggaagagggctccagaaggagctgagtctccccagaagaggaagtttgatagattcccagaagtggaattgcttggtcaaacgtctcactcccaggagcctgagtccaaccccatccagcccaggcagtccttgtagtcctctcttggcctttcacttttggagggaatgatctgcactgaattctccctgtgtgtccaaatgctgggagaacatcaccccttggatgaattgccaccacattaaataaaacatatccaaagctcaaaaaaaaa

SEQ ID NO: 239 - DNA, 1121 bp, Homo sapien
gtgcagcgcgggagcacagtggagcgcagatcgcggacccgagcgggcatgtccccgcgcgcgggagcctccgtttgcggccgggcccgggcggctgtgaacttagcagcgggctcctgcggccccgtcactgccatgtagtcgctggcggggctccctgcagcccgggagcggcagtgccagtgagcctgagcccaggagcccgcgtcttccccgggaggcgctgagtgcgcgccgcgcccccgccgctcgggaggcactttgggccagacagggaaatgggggagaaagtttcggaggcgccagagccggtgccccgcggctgcagtggccacggcagccggactccagcctctgcgctggtcgccgcgtcctctccgggtgcttcctcggccgagtcctcctcgggctcagaaactctgtcggaggaaggggagcccggcggcttctccagagagcatcagccgccgccgccgccgccgttgggaggcaccctgggcgcccgggcgcccgccgcgtgggctccggcaagcgtgctgctggagcgcggagtccttgcgctgccgccgccgcttcccggaggagctgtgccgcccgcgccccggggcagcagcgcgtcccaggaggagcaggacgaggagcttgaccacatattatcccctccacccatgccgtttcggaaatgcagcaacccagatgtggcttctggccctggaaaatcactgaagtataaaagacagctgagtgaggatggaagacagctaaggcgagggagcctgggaggagccctgactgggaggtaccttcttccaaacccggtggcgggacaggcctggccggcctctgcagagacgtccaacctcgtgcgcatgcgcagccaggccctgggccagtcggcgccctcgctcaccgccagcctgaaggagctgagtctccccagaagaggaagttttctcactcccaggagcctgagtccaaccccatccagcccaggcagtccttgtagtcctctcttggcctttcacttttggagccctgtgtgtccaaatgctgggagaacatcaccccttggatgaattgccaccacattaaataaaacatatccaaagctcaaaaaaaaa

SEQ ID NO: 240 - DNA, 663 bp, Homo sapien
cagaggggctcaacgctggacccaccctggccttggactcctggacctgagctctgatccccttcaggaaccccggcaccaatatatttctctctccacaaattaagatattgttttcttagaggcatagccttgcacccacagtcttgtttttggagtgtgtgactgctacttatatgatgaccttgccttgaacgtctctcacctggctcaatgccaggctgcagaggtatcactcattgctttcaactcaggatgaagagcgcgagcttcactgtgtacagagtcatctccgagggattacacagagtacaacaaaaggagaaggctcagtccttgacataagcaaagatatctgcggacagttgactgtaggattgtaaagtctcataactgccaggcatagtcgtcacgcctctaatcccagcacttagagaggcagaggcaagaagatagcgtaagcccagcagttcaagaccagcccgggcaatatagtgagaccccgttctccacaaaaaggaaaaaaaaagccaaaaaaaaaaagtcttgtaaccaataaacagaaattataagccatattgaaaaggcagtaggaagccaagctagaatcatttagataattgatgcttgagaaagatgcctttttaccagtacagtaaaagt

SEQ ID NO: 241 - DNA, 949 bp, Homo sapien
tgctaaagttatttgacacttcaggcctgagccagccatgagcctaatgatcccttcttccctaagcatgatgagtataactgttccttgaaaataataagcagaaagtgtttcggatgcaaagaaagtccccacaggcccttgtgccatgctggaagttagccccttccaaagatcatttgctctggttatcagcttccagatgagagtgttttcctcctgcctttctgttcttattcatttgaatctgctgagtctgaccattgtaattatccctggtattcattttgtcaaagtatattagtgagacatcaataatatggatcaacccattccctttctacttgtttggttgtattgattcagtttaaataaaagtcaacctactgtataatgtttgtttaccctgacccttgctgaacatttccacatcctcacagactatgtttgtgtcatttgtttgactaaaaatacttagtttccctggggttcccatgtgacagtacgccagtgttggcctaagctaaactcactttctcaataggactgatggacgccgctggtcgttggcttctctcccttcctctggctatgggacaaacacacccagctctacggtctctgtaagtgcctgactttttttttttttttctcttcctcacaacaacagagctatcacacaggcagtgttgttctctgggtgtttcctggtagggaggagaagataaattctgcatgtctgccactctgaataagtgacacactcaaatgatggcctgacaaaaataaaaaggacatagctttcgctgcaagcttttaaactgtagtgcataaattgagtaagttccaggatcacaagtttggaggaaactggaagctttcattttaataacatttggtgtagttcggggggaaaaacacaatctagttttattgctttaggttccat

SEQ ID NO: 242 - DNA, 711 bp, Homo sapien
cacagcaaatagcccttcattggcctctgcccagcctatcaccattaaagaatttgatttccaatacaatggttttgcttccagaggtttactttgtattatctcttagttaagttgtgtctgcatatttaggggtaggtactcagaagctttcaagcaaagagcatcctcctcatatacctaacaagtaaatgaatgtatttttaatgcattttatatttttcctatttttccaactcttcttaagtgtttggaattgagagaggctccattgtctactattaaatactcttcctttacatgtcataagaaggtttctaataggaaagtggtgttctgctctttaataggatctgctgttgtatccctgtccctcacacggagttattgagctgagcacaatggtattttggggaggcagcaatagttctgaaagaagactgaacaattttttcctgtttttctgtaggaggagatctcttttcaaaaagctagccaagcagccttctcctttactccacaccagccgaagtttctcctgcttgaacagatccctgtcatcgggtgagagcctcccaggttcccccactcatagcttgtctccccggtctccaacaccaagctaccgctccacccctgacttcccatctggtgagtgagtctcctggtctaaacagcagaggggaggggaggtaaagtcatgtgaggtcc

SEQ ID NO: 243 - DNA, 293 bp, Homo sapien
tcactgtcaggaagggcagcctccgaagagccatttcaactcagcccgacatcgccagagactagtggacccagctgcttcaaaaaaggagctgagtctccccagaagaggaagtttgtgcagaagcagtgattgtgactgggtaatagacaagagaagtgagagaaactgctttctaggcaagatgctgttatgagattgtcagccctgtgtgtccaaatgctgggagaacatcaccccttggatgaattgccaccacattaaataaaacatatccaaagctcaaaaaaaaa

SEQ ID NO: 244 - DNA, 229 bp, Homo sapien
gcgtgctgaagtagaggtagtacagcatggctagactgttgtgagaggctcagagaaagcagagggtgagatggatgagtccagcattctaagacgaagagggctccagaaggagctgagtctccccagaagaggaagtttccctgtgtgtccaaatgctgggagaacatcaccccttggatgaattgccaccacattaaataaaacatatccaaagctcaaaaaaaaa

SEQ ID NO: 245 - DNA, 7728 bp, Homo sapien
gtgcagcgcgggagcacagtggagcgcagatcgcggacccgagcgggcatgtccccgcgcgcgggagcctccgtttgcggccgggcccgggcggctgtgaacttagcagcgggctcctgcggccccgtcactgccatgtagtcgctggcggggctccctgcagcccgggagcggcagtgccagtgagcctgagcccaggagcccgcgtcttccccgggaggcgctgagtgcgcgccgcgcccccgccgctcgggaggcactttgggccagacagggaaatgggggagaaagtttcggaggcgccagagccggtgccccgcggctgcagtggccacggcagccggactccagcctctgcgctggtcgccgcgtcctctccgggtgcttcctcggccgagtcctcctcgggctcagaaactctgtcggaggaaggggagcccggcggcttctccagagagcatcagccgccgccgccgccgccgttgggaggcaccctgggcgcccgggcgcccgccgcgtgggctccggcaagcgtgctgctggagcgcggagtccttgcgctgccgccgccgcttcccggaggagctgtgccgcccgcgccccggggcagcagcgcgtcccaggaggagcaggacgaggagcttgaccacatattatcccctccacccatgccgtttcggaaatgcagcaacccagatgtggcttctggccctggaaaatcactgaagtataaaagacagctgagtgaggatggaagacagctaaggcgagggagcctgggaggagccctgactgggaggtaccttcttccaaacccggtggcgggacaggcctggccggcctctgcagagacgtccaacctcgtgcgcatgcgcagccaggccctgggccagtcggcgccctcgctcaccgccagcctgaaggagctgagtctccccagaagaggaagtttgatagattcccagaagtggaattgcttggtcaaacgttgccgaacaagcaaccggaaaagcttaataggcaatgggcagtcaccagcattgcctcgaccacactcacctctctctgctcatgcaggaaatagccctcaagatagtccaagaaatttctcccccagtgcctcagcccatttttcatttgcacggaggactgatggacgccgctggtcgttggcttctctcccttcctctggctatgggacaaacacacccagctctacggtctcttcatcctgttcctcccaggagaagttgcatcagttaccataccaaccaacaccagacgagttacacttcttatcaaaacatttctgtaccaccgaaagcatcgccactgagaacagatgcaggaacacgccgatgcgcccccgttcccgaagtctgagccctggacgttctcccgcctgctgtgaccatgaaataattatgatgaaccatgtctacaaagaaaggttcccaaaggctacagctcagatggaagaacgtctaaaggaaattatcaccagctactctcctgacaacgttctacccttagcagatggagtgcttagtttcactcaccaccagattattgaactggctcgagattgcttggataaatcccaccagggcctcatcacctcacgatacttccttgaattacagcacaaattagataagttgctacaggaggctcatgatcgttcagaaagtggagaattggcatttattaaacaactagttcgaaagatcctaattgttattgcccgccctgctcggttattagagtgcctggaatttgatccggaagaattttactacctattggaagcagcagaaggccatgccaaagaaggacagggtattaaaaccgacattcccaggtacatcattagccaactgggactcaataaggatcccttggaagaaatggctcatttgggaaactacgatagtgggacagcagaaacaccagaaacagatgaatcagtgagtagctctaatgcctccctgaaacttcgaaggaaacctcgggaaagtgattttgaaacgattaaattgattagcaatggagcctatggggcagtctactttgttcggcataaagaatcccggcagaggtttgccatgaagaagattaataaacagaacctcatccttcgaaaccagatccagcaggcctttgtggagcgggatatcctgacttttgcagaaaacccctttgttgtcagcatgtattgctcctttgaaacaaggcgccacttgtgcatggtcatggaatatgtggaagggggagactgtgctactttaatgaaaaacatgggtcctctccctgttgatatggccagaatgtactttgctgagacggtcttggccttggaatatttacataattatggaattgtacacagggatttgaaaccagacaacttgttggttacctccatggggcacataaagctgacagattttggattatctaaggtgggactaatgagcatgactaccaacctttacgagggtcatattgagaaggatgctagagagttcctggataaacaggtctgtggcacacctgaatacattgcaccagaagtgattctgaggcagggttatggaaagccggtggactggtgggccatggggattatcctctatgaatttctggttggatgcgtgccattctttggggatactccagaggagctatttggacaagtcatcagtgatgagatcaactggcctgagaaggatgaggcacccccacctgatgcccaggatctgattaccttactcctcaggcagaatcccctggagaggctgggaacaggtggtgcatatgaagtcaaacagcatcgattcttccgttctttagactggaacagtttgctgagacagaaggcagaatttattccccaactggaatctgaggatgacacaagttattttgatactcggtctgagaagtatcatcatatggaaacggaggaagaagatgacacaaatgatgaagactttaatgtggaaataaggcagttttcttcatgttcacacaggttttcaaaagttttcagcagtatagatcgaatcactcagaattcagcagaagagaaggaagactctgtggacaaaaccaaaagcaccaccttgccatccacagaaacactgagctggagttcagaatattctgaaatgcaacagctatcaacatccaactcttcagatactgaaagcaacagacataaactcagttctggcctacttcccaaactggctatttcaacagagggagagcaagatgaagctgcctcctgccctggagacccccatgaggagccaggaaagccagcccttcctcctgaagagtgtgcccaggaggagcctgaggtcaccaccccagccagcaccatcagcagctccaccctgtcagttggcagtttttcagagcacttggatcagataaatggacgaagcgagtgtgtggacagtacagataattcctcaaagccatccagtgaacccgcttctcacatggctcggcagcgattagaaagcacagaaaaaaagaaaatctcggggaaagtcacaaagtccctctctgccagtgctctttccctcatgatcccaggagatatgtttgctgtttcccctctgggaagtccaatgtctccccattccctgtcctcggacccttcttcttcacgagattcctctcccagccgagattcctcagcagcttctgccagtccacatcagccgattgtgatccacagttcggggaagaactacggctttaccatccgagccatccgggtgtatgtgggagacagtgacatctatacagtgcaccatatcgtctggaatgtagaagaaggaagtccggcatgccaggcaggactgaaggctggagatcttatcactcacatcaatggagaaccagtgcatggacttgtccacacagaagttatagaactcctactgaagagtgggaataaggtgtcaatcactactaccccatttgaaaacacatcaatcaaaactggaccagccaggagaaacagctataagagccggatggtgaggcggagcaagaaatccaagaagaaagaaagtctcgaaaggaggagatctcttttcaaaaagctagccaagcagccttctcctttactccacaccagccgaagtttctcctgcttgaacagatccctgtcatcgggtgagagcctcccaggttcccccactcatagcttgtctccccggtctccaacaccaagctaccgctccacccctgacttcccatctggtactaattcctcccagagcagctcccctagttctagtgcccccaattccccagcagggtccgggcacatccggcccagcactctccacggtcttgcacccaaactcggcgggcagcggtaccggtccggaaggcgaaagtccgccggcaacatcccactgtccccgctggcccggacgccctctccaaccccgcaacccacctccccgcagcggtcaccatcccctcttctgggacactcactgggcaattccaagatcgcgcaagcctttcccagcaagatgcactccccgcccaccatcgtcagacacatcgtgaggcccaagagtgcggagccccccaggtccccgctgctcaagcgcgtgcagtccgaggagaagctgtcgccctcttacggcagtgacaagaagcacctgtgctcccgcaagcacagcctggaggtgacccaagaggaggtgcagcgggagcagtcccagcgggaggcgccgctgcagagcctggatgagaacgtgtgcgacgtgccgccgctcagccgcgcccggccagtggagcaaggctgcctgaaacgcccagtctcccggaaggtgggccgccaggagtctgtggacgacctggaccgcgacaagctgaaggccaaggtggtggtgaagaaagcagacggcttcccagagaaacaggaatcccaccagaaatcccatggacccgggagtgatttggaaaactttgctctgtttaagctggaagagagagagaagaaagtctatccgaaggctgtggaaaggtcaagtacttttgaaaacaaagcgtctatgcaggaggcgccaccgctgggcagcctgctgaaggatgctcttcacaagcaggccagcgtgcgcgccagcgagggtgcgatgtcggatggcccggtgcctgcggagcaccgccagggtggcggggacttcagacgggcccccgctcctggcaccctccaggatggtctctgccactccctcgacaggggcatctctgggaagggggaaggcacggagaagtcctcccaggccaaggagcttctccgatgtgaaaagttagacagcaagctggccaacatcgattacctccgaaagaaaatgtcacttgaggacaaagaggacaacctctgccctgtgctgaagcccaagatgacagctggctcccacgaatgcctgccagggaacccagtccgacccacgggtgggcagcaggagcccccgccggcttctgagagccgagcttttgtcagcagcacccatgcagctcagatgagtgccgtctcttttgttcccctcaaggccttaacaggccgggtggacagtggaacggagaagcctggcttggttgctcctgagtcccctgttaggaagagcccctccgagtataagctggaaggtaggtctgtctcatgcctgaagccgatcgagggcactctggacattgctctcctgtccggacctcaggcctccaagacagaactgccttccccagagtctgcacagagccccagcccaagtggtgacgtgagggcctctgtgccaccagttctccccagcagcagtgggaaaaagaacgataccaccagtgcaagagagctttctccttccagcttaaagatgaataaatcctacctgctggagccttggttcctgccccccagccgaggtctccagaattcaccagcagtttccctgcctgacccagagttcaagagggacaggaaaggtccccatcctactgccaggagccctggaacagtcatggaaagcaatccccaacagagagagggcagctcccctaaacaccaagaccacaccactgaccccaagcttctgacctgcctggggcagaacctccacagccctgacctggccaggccacgctgcccgctcccacctgaagcttccccctcaagggagaagccaggcctgagggaatcgtctgaaagaggccctcccacagccagaagcgagcgctctgctgcgagggctgacacatgcagagagccctccatggaactgtgctttccagaaactgcgaaaaccagtgacaactccaaaaatctcctctctgtgggaaggacccacccagatttctatacacagacccaggccatggagaaagcatgggcgccgggtgggaaaacgaaccacaaagatggcccaggtgaggcgaggcccccgcccagagacaactcctctctgcactcagctggaattccctgtgagaaggagctgggcaaggtgaggcgtggcgtggaacccaagcccgaagcgcttcttgccaggcggtctctgcagccacctggaattgagagtgagaagagtgaaaagctctccagtttcccatctttgcagaaagatggtgccaaggaacctgaaaggaaggagcagcctctacaaaggcatcccagcagcatccctccgccccctctgacggccaaagacctgtccagcccggctgccaggcagcattgcagttccccaagccacgcttctggcagagagccgggggccaagcccagcactgcagagcccagctcgagcccccaggaccctcccaagcctgttgctgcgcacagtgaaagcagcagccacaagccccggcctgccaccgacggaggcagacaagcccaatggcatgaaacggtccccctcagccactgggcagagttctttccgatccacggccctcccggaaaagtctctgagctgctcctccagcttccctgaaaccagggccggagttagagaggcctctgcagccagcagcgacacctcttctgccaaggccgccgggggcatgctggagcttccagcccccagcaacagggaccataggaaggctcagcctgccggggagggccgaacccacatgacaaagagtgactccctgccctccttccgggtctccaccctgcctctggagtcacaccaccccgacccaaacaccatgggcggggccagccaccgggacagggctctctcggtgactgccaccgtaggggaaaccaaagggaaggaccctgccccagcccagcctcccccagctaggaaacagaacgtgggcagagacgtgaccaagccatccccagccccaaacactgaccgccccatctctctttctaatgagaaggactttgtggtacggcagaggcgggggaaagagagtttgcgtagcagccctcacaaaaaggccttgtaacggggagggcccaggggcaggactgtggagacccgtcctgaacgggcgactgtgtcttgactacctttcaaaaccagcactgtgtgggaatgtccgccaggcagagctcggagcctcattgagacaggggagagagaaagacaaagaggggaccttcttccagatgccttcccagttgtaaccggtaaaactgttaccagatagtgttggtcggacttaggtccccaggtt

SEQ ID NO: 246 - DNA, 7664 bp, Homo sapien
gtgcagcgcgggagcacagtggagcgcagatcgcggacccgagcgggcatgtccccgcgcgcgggagcctccgtttgcggccgggcccgggcggctgtgaacttagcagcgggctcctgcggccccgtcactgccatgtagtcgctggcggggctccctgcagcccgggagcggcagtgccagtgagcctgagcccaggagcccgcgtcttccccgggaggcgctgagtgcgcgccgcgcccccgccgctcgggaggcactttgggccagacagggaaatgggggagaaagtttcggaggcgccagagccggtgccccgcggctgcagtggccacggcagccggactccagcctctgcgctggtcgccgcgtcctctccgggtgcttcctcggccgagtcctcctcgggctcagaaactctgtcggaggaaggggagcccggcggcttctccagagagcatcagccgccgccgccgccgccgttgggaggcaccctgggcgcccgggcgcccgccgcgtgggctccggcaagcgtgctgctggagcgcggagtccttgcgctgccgccgccgcttcccggaggagctgtgccgcccgcgccccggggcagcagcgcgtcccaggaggagcaggacgaggagcttgaccacatattatcccctccacccatgccgtttcggaaatgcagcaacccagatgtggcttctggccctggaaaatcactgaagtataaaagacagctgagtgaggatggaagacagctaaggcgagggagcctgggaggagccctgactgggaggtaccttcttccaaacccggtggcgggacaggcctggccggcctctgcagagacgtccaacctcgtgcgcatgcgcagccaggccctgggccagtcggcgccctcgctcaccgccagcctgaaggagctgagtctccccagaagaggaagtttgatagattcccagaagtggaattgcttggtcaaacgttgccgaacaagcaaccggaaaagcttaataggcaatgggcagtcaccagcattgcctcgaccacactcacctctctctgctcatgcaggaaatagccctcaagatagtccaagaaatttctcccccagtgcctcagcccatttttcatttgcacggaggactgatggacgccgctggtcgttggcttctctcccttcctctggctatgggacaaacacacccagctctacggtctcttcatcctgttcctcccaggagaagttgcatcagttaccataccaaccaacaccagacgagttacacttcttatcaaaacatttctgtaccaccgaaagcatcgccactgagaacagatgcaggaacacgccgatgcgcccccgttcccgaagtctgagccctggacgttctcccgcctgctgtgaccatgaaataattatgatgaaccatgtctacaaagaaaggttcccaaaggctacagctcagatggaagaacgtctaaaggaaattatcaccagctactctcctgacaacgttctacccttagcagatggagtgcttagtttcactcaccaccagattattgaactggctcgagattgcttggataaatcccaccagggcctcatcacctcacgatacttccttgaattacagcacaaattagataagttgctacaggaggctcatgatcgttcagaaagtggagaattggcatttattaaacaactagttcgaaagatcctaattgttattgcccgccctgctcggttattagagtgcctggaatttgatccggaagaattttactacctattggaagcagcagaaggccatgccaaagaaggacagggtattaaaaccgacattcccaggtacatcattagccaactgggactcaataaggatcccttggaagaaatggctcatttgggaaactacgatagtgggacagcagaaacaccagaaacagatgaatcagtgagtagctctaatgcctccctgaaacttcgaaggaaacctcgggaaagtgattttgaaacgattaaattgattagcaatggagcctatggggcagtctactttgttcggcataaagaatcccggcagaggtttgccatgaagaagattaataaacagaacctcatccttcgaaaccagatccagcaggcctttgtggagcgggatatcctgacttttgcagaaaacccctttgttgtcagcatgtattgctcctttgaaacaaggcgccacttgtgcatggtcatggaatatgtggaagggggagactgtgctactttaatgaaaaacatgggtcctctccctgttgatatggccagaatgtactttgctgagacggtcttggccttggaatatttacataattatggaattgtacacagggatttgaaaccagacaacttgttggttacctccatggggcacataaagctgacagattttggattatctaaggtgggactaatgagcatgactaccaacctttacgagggtcatattgagaaggatgctagagagttcctggataaacaggtctgtggcacacctgaatacattgcaccagaagtgattctgaggcagggttatggaaagccggtggactggtgggccatggggattatcctctatgaatttctggttggatgcgtgccattctttggggatactccagaggagctatttggacaagtcatcagtgatgagatcaactggcctgagaaggatgaggcacccccacctgatgcccaggatctgattaccttactcctcaggcagaatcccctggagaggctgggaacaggtggtgcatatgaagtcaaacagcatcgattcttccgttctttagactggaacagtttgctgagacagaaggcagaatttattccccaactggaatctgaggatgacacaagttattttgatactcggtctgagaagtatcatcatatggaaacggaggaagaagatgacacaaatgatgaagactttaatgtggaaataaggcagttttcttcatgttcacacaggttttcaaaagttttcagcagtatagatcgaatcactcagaattcagcagaagagaaggaagactctgtggacaaaaccaaaagcaccaccttgccatccacagaaacactgagctggagttcagaatattctgaaatgcaacagctatcaacatccaactcttcagatactgaaagcaacagacataaactcagttctggcctacttcccaaactggctatttcaacagagggagagcaagatgaagctgcctcctgccctggagacccccatgaggagccaggaaagccagcccttcctcctgaagagtgtgcccaggaggagcctgaggtcaccaccccagccagcaccatcagcagctccaccctgtcagttggcagtttttcagagcacttggatcagataaatggacgaagcgagtgtgtggacagtacagataattcctcaaagccatccagtgaacccgcttctcacatggctcggcagcgattagaaagcacagaaaaaaagaaaatctcggggaaagtcacaaagtccctctctgccagtgctctttccctcatgatcccaggagatatgtttgctgtttcccctctgggaagtccaatgtctccccattccctgtcctcggacccttcttcttcacgagattcctctcccagccgagattcctcagcagcttctgccagtccacatcagccgattgtgatccacagttcggggaagaactacggctttaccatccgagccatccgggtgtatgtgggagacagtgacatctatacagtgcaccatatcgtctggaatgtagaagaaggaagtccggcatgccaggcaggactgaaggctggagatcttatcactcacatcaatggagaaccagtgcatggacttgtccacacagaagttatagaactcctactgaagagtgggaataaggtgtcaatcactactaccccatttgaaaacacatcaatcaaaactggaccagccaggagaaacagctataagagccggatggtgaggcggagcaagaaatccaagaagaaagaaagtctcgaaaggaggagatctcttttcaaaaagctagccaagcagccttctcctttactccacaccagccgaagtttctcctgcttgaacagatccctgtcatcgggtgagagcctcccaggttcccccactcatagcttgtctccccggtctccaacaccaagctaccgctccacccctgacttcccatctggtactaattcctcccagagcagctcccctagttctagtgcccccaattccccagcagggtccgggcacatccggcccagcactctccacggtcttgcacccaaactcggcgggcagcggtaccggtccggaaggcgaaagtccgccggcaacatcccactgtccccgctggcccggacgccctctccaaccccgcaacccacctccccgcagcggtcaccatcccctcttctgggacactcactgggcaattccaagatcgcgcaagcctttcccagcaagatgcactccccgcccaccatcgtcagacacatcgtgaggcccaagagtgcggagccccccaggtccccgctgctcaagcgcgtgcagtccgaggagaagctgtcgccctcttacggcagtgacaagaagcacctgtgctcccgcaagcacagcctggaggtgacccaagaggaggtgcagcgggagcagtcccagcgggaggcgccgctgcagagcctggatgagaacgtgtgcgacgtgccgccgctcagccgcgcccggccagtggagcaaggctgcctgaaacgcccagtctcccggaaggtgggccgccaggagtctgtggacgacctggaccgcgacaagctgaaggccaaggtggtggtgaagaaagcagacggcttcccagagaaacaggaatcccaccagaaatcccatggacccgggagtgatttggaaaactttgctctgtttaagctggaagagagagagaagaaagtctatccgaaggctgtggaaaggtcaagtacttttgaaaacaaagcgtctatgcaggaggcgccaccgctgggcagcctgctgaaggatgctcttcacaagcaggccagcgtgcgcgccagcgagggtgcgatgtcggatggcccggtgcctgcggagcaccgccagggtggcggggacttcagacgggcccccgctcctggcaccctccaggatggtctctgccactccctcgacaggggcatctctgggaagggggaaggcacggagaagtcctcccaggccaaggagcttctccgatgtgaaaagttagacagcaagctggccaacatcgattacctccgaaagaaaatgtcacttgaggacaaagaggacaacctctgccctgtgctgaagcccaagatgacagctggctcccacgaatgcctgccagggaacccagtccgacccacgggtgggcagcaggagcccccgccggcttctgagagccgagcttttgtcagcagcacccatgcagctcagatgagtgccgtctcttttgttcccctcaaggccttaacaggccgggtggacagtggaacggagaagcctggcttggttgctcctgagtcccctgttaggaagagcccctccgagtataagctggaaggtaggtctgtctcatgcctgaagccgatcgagggcactctggacattgctctcctgtccggacctcaggcctccaagacagaactgccttccccagagtctgcacagagccccagcccaagtggtgacgtgagggcctctgtgccaccagttctccccagcagcagtgggaaaaagaacgataccaccagtgcaagagagctttctccttccagcttaaagatgaataaatcctacctgctggagccttggttcctgccccccagccgaggtctccagaattcaccagcagtttccctgcctgacccagagttcaagagggacaggaaaggtccccatcctactgccaggagccctggaacagtcatggaaagcaatccccaacagagagagggcagctcccctaaacaccaagaccacaccactgaccccaagcttctgacctgcctggggcagaacctccacagccctgacctggccaggccacgctgcccgctcccacctgaagcttccccctcaagggagaagccaggcctgagggaatcgtctgaaagaggccctcccacagccagaagcgagcgctctgctgcgagggctgacacatgcagagagccctccatggaactgtgctttccagaaactgcgaaaaccagtgacaactccaaaaatctcctctctgtgggaaggacccacccagatttctatacacagacccaggccatggagaaagcatgggcgccgggtgggaaaacgaaccacaaagatggcccaggtgaggcgaggcccccgcccagagacaactcctctctgcactcagctggaattccctgtgagaaggagctgggcaaggtgaggcgtggcgtggaacccaagcccgaagcgcttcttgccaggcggtctctgcagccacctggaattgagagtgagaagagtgaaaagctctccagtttcccatctttgcagaaagatggtgccaaggaacctgaaaggaaggagcagcctctacaaaggcatcccagcagcatccctccgccccctctgacggccaaagacctgtccagcccggctgccaggcagcattgcagttccccaagccacgcttctggcagagagccgggggccaagcccagcactgcagagcccagctcgagcccccaggaccctcccaagcctgttgctgcgcacagtgaaagcagcagccacaagccccggcctggccctgacccgggccctccaaagactaagcaccccgaccggtccctctcctctcagaaaccaagtgtcggggccacaaagggcaaagagcctgccactcagtccctcggtggctctagcagagaggggaagggccacagtaagagtgggccggatgtgtttcctgctaccccaggctcccagaacaaagccagcgatgggattggccagggagaaggtgggccctctgtcccactgcacactgacagggctcctctagacgccaagccacaacccaccagtggtgggcggcccctggaggtgctggagaagcctgtgcatttgccaaggccgggacacccagggcctagtgagccagcggaccagaaactgtccgctgttggtgaaaagcaaaccctgtctccaaagcaccccaaaccatccactgtgaaagatcgccccatctctctttctaatgagaaggactttgtggtacggcagaggcgggggaaagagagtttgcgtagcagccctcacaaaaaggccttgtaacggggagggcccaggggcaggactgtggagacccgtcctgaacgggcgactgtgtcttgactacctttcaaaaccagcactgtgtgggaatgtccgccaggcagagctcggagcctcattgagacaggggagagagaaagacaaagaggggaccttcttccagatgccttcccagttgtaaccggtaaaactgttaccagatagtgttggtcggacttaggtccccaggtt

SEQ ID NO: 247 - DNA, 5455 bp, Homo sapien
gtgcagcgcgggagcacagtggagcgcagatcgcggacccgagcgggcatgtccccgcgcgcgggagcctccgtttgcggccgggcccgggcggctgtgaacttagcagcgggctcctgcggccccgtcactgccatgtagtcgctggcggggctccctgcagcccgggagcggcagtgccagtgagcctgagcccaggagcccgcgtcttccccgggaggcgctgagtgcgcgccgcgcccccgccgctcgggaggcactttgggccagacagggaaatgggggagaaagtttcggaggcgccagagccggtgccccgcggctgcagtggccacggcagccggactccagcctctgcgctggtcgccgcgtcctctccgggtgcttcctcggccgagtcctcctcgggctcagaaactctgtcggaggaaggggagcccggcggcttctccagagagcatcagccgccgccgccgccgccgttgggaggcaccctgggcgcccgggcgcccgccgcgtgggctccggcaagcgtgctgctggagcgcggagtccttgcgctgccgccgccgcttcccggaggagctgtgccgcccgcgccccggggcagcagcgcgtcccaggaggagcaggacgaggagcttgaccacatattatcccctccacccatgccgtttcggaaatgcagcaacccagatgtggcttctggccctggaaaatcactgaagtataaaagacagctgagtgaggatggaagacagctaaggcgagggagcctgggaggagccctgactgggaggtaccttcttccaaacccggtggcgggacaggcctggccggcctctgcagagacgtccaacctcgtgcgcatgcgcagccaggccctgggccagtcggcgccctcgctcaccgccagcctgaaggagctgagtctccccagaagaggaagtttgatagattcccagaagtggaattgcttggtcaaacgttgccgaacaagcaaccggaaaagcttaataggcaatgggcagtcaccagcattgcctcgaccacactcacctctctctgctcatgcaggaaatagccctcaagatagtccaagaaatttctcccccagtgcctcagcccatttttcatttgcacggaggactgatggacgccgctggtcgttggcttctctcccttcctctggctatgggacaaacacacccagctctacggtctcttcatcctgttcctcccaggagaagttgcatcagttaccataccaaccaacaccagacgagttacacttcttatcaaaacatttctgtaccaccgaaagcatcgccactgagaacagatgcaggaacacgccgatgcgcccccgttcccgaagtctgagccctggacgttctcccgcctgctgtgaccatgaaataattatgatgaaccatgtctacaaagaaaggttcccaaaggctacagctcagatggaagaacgtctaaaggaaattatcaccagctactctcctgacaacgttctacccttagcagatggagtgcttagtttcactcaccaccagattattgaactggctcgagattgcttggataaatcccaccagggcctcatcacctcacgatacttccttgaattacagcacaaattagataagttgctacaggaggctcatgatcgttcagaaagtggagaattggcatttattaaacaactagttcgaaagatcctaattgttattgcccgccctgctcggttattagagtgcctggaatttgatccggaagaattttactacctattggaagcagcagaaggccatgccaaagaaggacagggtattaaaaccgacattcccaggtacatcattagccaactgggactcaataaggatcccttggaagaaatggctcatttgggaaactacgatagtgggacagcagaaacaccagaaacagatgaatcagtgagtagctctaatgcctccctgaaacttcgaaggaaacctcgggaaagtgattttgaaacgattaaattgattagcaatggagcctatggggcagtctactttgttcggcataaagaatcccggcagaggtttgccatgaagaagattaataaacagaacctcatccttcgaaaccagatccagcaggcctttgtggagcgggatatcctgacttttgcagaaaacccctttgttgtcagcatgtattgctcctttgaaacaaggcgccacttgtgcatggtcatggaatatgtggaagggggagactgtgctactttaatgaaaaacatgggtcctctccctgttgatatggccagaatgtactttgctgagacggtcttggccttggaatatttacataattatggaattgtacacagggatttgaaaccagacaacttgttggttacctccatggggcacataaagctgacagattttggattatctaaggtgggactaatgagcatgactaccaacctttacgagggtcatattgagaaggatgctagagagttcctggataaacaggtctgtggcacacctgaatacattgcaccagaagtgattctgaggcagggttatggaaagccggtggactggtgggccatggggattatcctctatgaatttctggttggatgcgtgccattctttggggatactccagaggagctatttggacaagtcatcagtgatgagatcaactggcctgagaaggatgaggcacccccacctgatgcccaggatctgattaccttactcctcaggcagaatcccctggagaggctgggaacaggtggtgcatatgaagtcaaacagcatcgattcttccgttctttagactggaacagtttgctgagacagaaggcagaatttattccccaactggaatctgaggatgacacaagttattttgatactcggtctgagaagtatcatcatatggaaacggaggaagaagatgacacaaatgatgaagactttaatgtggaaataaggcagttttcttcatgttcacacaggttttcaaaagttttcagcagtatagatcgaatcactcagaattcagcagaagagaaggaagactctgtggacaaaaccaaaagcaccaccttgccatccacagaaacactgagctggagttcagaatattctgaaatgcaacagctatcaacatccaactcttcagatactgaaagcaacagacataaactcagttctggcctacttcccaaactggctatttcaacagagggagagcaagatgaagctgcctcctgccctggagacccccatgaggagccaggaaagccagcccttcctcctgaagagtgtgcccaggaggagcctgaggtcaccaccccagccagcaccatcagcagctccaccctgtcagttggcagtttttcagagcacttggatcagataaatggacgaagcgagtgtgtggacagtacagataattcctcaaagccatccagtgaacccgcttctcacatggctcggcagcgattagaaagcacagaaaaaaagaaaatctcggggaaagtcacaaagtccctctctgccagtgctctttccctcatgatcccaggagatatgtttgctgtttcccctctgggaagtccaatgtctccccattccctgtcctcggacccttcttcttcacgagattcctctcccagccgagattcctcagcagcttctgccagtccacatcagccgattgtgatccacagttcggggaagaactacggctttaccatccgagccatccgggtgtatgtgggagacagtgacatctatacagtgcaccatatcgtctggaatgtagaagaaggaagtccggcatgccaggcaggactgaaggctggagatcttatcactcacatcaatggagaaccagtgcatggacttgtccacacagaagttatagaactcctactgaaggtattgtatgttttatgtcagggccatgctgatgagacaggcagcccaaaggggctagtaccaggagattgatttccctgtgtcacacccatgtctgattactgagaaagtattcattagtctcaagtttaaagacaaagatattatgaattctctggttttatgtcatgaaataatgtccttatatctgcatactcattccctaatttaattttgcttctcattctaaattgtaagtagtaagaattctctttgtttatataccttacacagtgacatctatttggagagtcacctatcctgaaggtgacttccttcaggaacttctaacaggtttcattctagtatactagaagacaaaattgtattaaactgtgaggtttgatctgaaggtttagtctgagaattagagttcctttgaaagataaaattgtaaatatatacacatgtactataaattataaaacataagtggtactgaaagaagaagttctagcaattattaggcctccctccccaccatacaaattaacttaaacagggatcaatttctacttaaaatgtaagcagaatatagcctatggagtaagaaggtcacaggaagcatgactgtaaatggagagagagaaaggacacacactgatcctctcagatagctctcagatagttctgttcagttatttgatttgtctttttcattctttatagcagcgttgtattttatgcagaacagctcctgcgacagcatatctctagatagtatcatatgtctgttcacaacattagaataagaaataatacactgaaatgtatatattgagaagtatacatttgcttattttgctgagacataattgatcactttcgtgatttattttgtaaagtattttaatagaattctgtattttaaaacttctcttcctgcttctatgaaatttgaatgtgtatttcccctagaggactctggcaaggtctcttagcagactcagatgatcccatttctattgtcttgccctcatctggctacggagcaccttgcacaacccaaagccttcatttctggatgcagtcgatgtgtgtcactgaaactgcttaaacagtggagtggagagccattggcaccctttgaagccacggtgtactctgtcacaaatccaaagaacatcctgcctgtgttcataaaggaagcactcaagaggagtaagcaatgtcatgaaaccaagaggatacaagggatttaattatcttcccagtgaactgtgtaatcatgcagcttccttccaaatttaaccagtgactcttgaaatcagagtattaagtgactagtgtcagtgctgggctcctgtgtgccttcattggtttaacagcagggaagttggctgtattatggtactctcgaatgctgtttacacagtgttttatacttgcaaaggactttacggaatgtcatggcagtcttagagaaaggtggagaagtcctgacaggggtgtag

SEQ ID NO: 248 - DNA, 4341 bp, Homo sapien
gtgcagcgcgggagcacagtggagcgcagatcgcggacccgagcgggcatgtccccgcgcgcgggagcctccgtttgcggccgggcccgggcggctgtgaacttagcagcgggctcctgcggccccgtcactgccatgtagtcgctggcggggctccctgcagcccgggagcggcagtgccagtgagcctgagcccaggagcccgcgtcttccccgggaggcgctgagtgcgcgccgcgcccccgccgctcgggaggcactttgggccagacagggaaatgggggagaaagtttcggaggcgccagagccggtgccccgcggctgcagtggccacggcagccggactccagcctctgcgctggtcgccgcgtcctctccgggtgcttcctcggccgagtcctcctcgggctcagaaactctgtcggaggaaggggagcccggcggcttctccagagagcatcagccgccgccgccgccgccgttgggaggcaccctgggcgcccgggcgcccgccgcgtgggctccggcaagcgtgctgctggagcgcggagtccttgcgctgccgccgccgcttcccggaggagctgtgccgcccgcgccccggggcagcagcgcgtcccaggaggagcaggacgaggagcttgaccacatattatcccctccacccatgccgtttcggaaatgcagcaacccagatgtggcttctggccctggaaaatcactgaagtataaaagacagctgagtgaggatggaagacagctaaggcgagggagcctgggaggagccctgactgggaggtaccttcttccaaacccggtggcgggacaggcctggccggcctctgcagagacgtccaacctcgtgcgcatgcgcagccaggccctgggccagtcggcgccctcgctcaccgccagcctgaaggagctgagtctccccagaagaggaagtttgatagattcccagaagtggaattgcttggtcaaacgttgccgaacaagcaaccggaaaagcttaataggcaatgggcagtcaccagcattgcctcgaccacactcacctctctctgctcatgcaggaaatagccctcaagatagtccaagaaatttctcccccagtgcctcagcccatttttcatttgcacggaggactgatggacgccgctggtcgttggcttctctcccttcctctggctatgggacaaacacacccagctctacggtctcttcatcctgttcctcccaggagaagttgcatcagttaccataccaaccaacaccagacgagttacacttcttatcaaaacatttctgtaccaccgaaagcatcgccactgagaacagatgcaggaacacgccgatgcgcccccgttcccgaagtctgagccctggacgttctcccgcctgctgtgaccatgaaataattatgatgaaccatgtctacaaagaaaggttcccaaaggctacagctcagatggaagaacgtctaaaggaaattatcaccagctactctcctgacaacgttctacccttagcagatggagtgcttagtttcactcaccaccagattattgaactggctcgagattgcttggataaatcccaccagggcctcatcacctcacgatacttccttgaattacagcacaaattagataagttgctacaggaggctcatgatcgttcagaaagtggagaattggcatttattaaacaactagttcgaaagatcctaattgttattgcccgccctgctcggttattagagtgcctggaatttgatccggaagaattttactacctattggaagcagcagaaggccatgccaaagaaggacagggtattaaaaccgacattcccaggtacatcattagccaactgggactcaataaggatcccttggaagaaatggctcatttgggaaactacgatagtgggacagcagaaacaccagaaacagatgaatcagtgagtagctctaatgcctccctgaaacttcgaaggaaacctcgggaaagtgattttgaaacgattaaattgattagcaatggagcctatggggcagtctactttgttcggcataaagaatcccggcagaggtttgccatgaagaagattaataaacagaacctcatccttcgaaaccagatccagcaggcctttgtggagcgggatatcctgacttttgcagaaaacccctttgttgtcagcatgtattgctcctttgaaacaaggcgccacttgtgcatggtcatggaatatgtggaagggggagactgtgctactttaatgaaaaacatgggtcctctccctgttgatatggccagaatgtactttgctgagacggtcttggccttggaatatttacataattatggaattgtacacagggatttgaaaccagacaacttgttggttacctccatggggcacataaagctgacagattttggattatctaaggtgggactaatgagcatgactaccaacctttacgagggtcatattgagaaggatgctagagagttcctggataaacaggtctgtggcacacctgaatacattgcaccagaagtgattctgaggcagggttatggaaagccggtggactggtgggccatggggattatcctctatgaatttctggttggatgcgtgccattctttggggatactccagaggagctatttggacaagtcatcagtgatgagatcaactggcctgagaaggatgaggcacccccacctgatgcccaggatctgattaccttactcctcaggcagaatcccctggagaggctgggaacaggtggtgcatatgaagtcaaacagcatcgattcttccgttctttagactggaacagtttgctgagacagaaggcagaatttattccccaactggaatctgaggatgacacaagttattttgatactcggtctgagaagtatcatcatatggaaacggaggaagaagatgacacaaatgatgaagactttaatgtggaaataaggcagttttcttcatgttcacacaggttttcaaaagttttcagcagtatagatcgaatcactcagaattcagcagaagagaaggaagactctgtggacaaaaccaaaagcaccaccttgccatccacagaaacactgagctggagttcagaatattctgaaatgcaacagctatcaacatccaactcttcagatactgaaagcaacagacataaactcagttctggcctacttcccaaactggctatttcaacagagggagagcaagatgaagctgcctcctgccctggagacccccatgaggagccaggaaagccagcccttcctcctgaagagtgtgcccaggaggagcctgaggtcaccaccccagccagcaccatcagcagctccaccctgtcagttggcagtttttcagagcacttggatcagataaatggacgaagcgagtgtgtggacagtacagataattcctcaaagccatccagtgaacccgcttctcacatggctcggcagcgattagaaagcacagaaaaaaagaaaatctcggggaaagtcacaaagtccctctctgccagtgctctttccctcatgatcccaggagatatgtttgctgtttcccctctgggaagtccaatgtctccccattccctgtcctcggacccttcttcttcacgagattcctctcccagccgagattcctcagcagcttctgccagtccacatcagccgattgtgatccacagttcggggaagaactacggctttaccatccgagccatccgggtgtatgtgggagacagtgacatctatacagtgcaccatatcgtctggaatgtagaagaaggaagtccggcatgccaggcaggactgaaggctggagatcttatcactcacatcaatggagaaccagtgcatggacttgtccacacagaagttatagaactcctactgaagagtgggaataaggtgtcaatcactactaccccatttgaaaacacatcaatcaaaactggaccagccaggagaaacagctataagagccggatggtgaggcggagcaagaaatccaagaagaaagaaagtctcgaaaggaggagatctcttttcaaaaagctagccaagcagccttctcctttactccacaccagccgaagtttctcctgcttgaacagatccctgtcatcgggtgagagcctcccaggttcccccactcatagcttgtctccccggtctccaacaccaagctaccgctccacccctgacttcccatctggtgagtgagtctcctggtctaaacagcagaggggaggggaggtaaagtcatgtgaggtcc

SEQ ID NO: 249 - DNA, 3918 bp, Homo sapien
gtgcagcgcgggagcacagtggagcgcagatcgcggacccgagcgggcatgtccccgcgcgcgggagcctccgtttgcggccgggcccgggcggctgtgaacttagcagcgggctcctgcggccccgtcactgccatgtagtcgctggcggggctccctgcagcccgggagcggcagtgccagtgagcctgagcccaggagcccgcgtcttccccgggaggcgctgagtgcgcgccgcgcccccgccgctcgggaggcactttgggccagacagggaaatgggggagaaagtttcggaggcgccagagccggtgccccgcggctgcagtggccacggcagccggactccagcctctgcgctggtcgccgcgtcctctccgggtgcttcctcggccgagtcctcctcgggctcagaaactctgtcggaggaaggggagcccggcggcttctccagagagcatcagccgccgccgccgccgccgttgggaggcaccctgggcgcccgggcgcccgccgcgtgggctccggcaagcgtgctgctggagcgcggagtccttgcgctgccgccgccgcttcccggaggagctgtgccgcccgcgccccggggcagcagcgcgtcccaggaggagcaggacgaggagcttgaccacatattatcccctccacccatgccgtttcggaaatgcagcaacccagatgtggcttctggccctggaaaatcactgaagtataaaagacagctgagtgaggatggaagacagctaaggcgagggagcctgggaggagccctgactgggaggtaccttcttccaaacccggtggcgggacaggcctggccggcctctgcagagacgtccaacctcgtgcgcatgcgcagccaggccctgggccagtcggcgccctcgctcaccgccagcctgaaggagctgagtctccccagaagaggaagtttgatagattcccagaagtggaattgcttggtcaaacgttgccgaacaagcaaccggaaaagcttaataggcaatgggcagtcaccagcattgcctcgaccacactcacctctctctgctcatgcaggaaatagccctcaagatagtccaagaaatttctcccccagtgcctcagcccatttttcatttgcacggaggactgatggacgccgctggtcgttggcttctctcccttcctctggctatgggacaaacacacccagctctacggtctcttcatcctgttcctcccaggagaagttgcatcagttaccataccaaccaacaccagacgagttacacttcttatcaaaacatttctgtaccaccgaaagcatcgccactgagaacagatgcaggaacacgccgatgcgcccccgttcccgaagtctgagccctggacgttctcccgcctgctgtgaccatgaaataattatgatgaaccatgtctacaaagaaaggttcccaaaggctacagctcagatggaagaacgtctaaaggaaattatcaccagctactctcctgacaacgttctacccttagcagatggagtgcttagtttcactcaccaccagattattgaactggctcgagattgcttggataaatcccaccagggcctcatcacctcacgatacttccttgaattacagcacaaattagataagttgctacaggaggctcatgatcgttcagaaagtggagaattggcatttattaaacaactagttcgaaagatcctaattgttattgcccgccctgctcggttattagagtgcctggaatttgatccggaagaattttactacctattggaagcagcagaaggccatgccaaagaaggacagggtattaaaaccgacattcccaggtacatcattagccaactgggactcaataaggatcccttggaagaaatggctcatttgggaaactacgatagtgggacagcagaaacaccagaaacagatgaatcagtgagtagctctaatgcctccctgaaacttcgaaggaaacctcgggaaagtgattttgaaacgattaaattgattagcaatggagcctatggggcagtctactttgttcggcataaagaatcccggcagaggtttgccatgaagaagattaataaacagaacctcatccttcgaaaccagatccagcaggcctttgtggagcgggatatcctgacttttgcagaaaacccctttgttgtcagcatgtattgctcctttgaaacaaggcgccacttgtgcatggtcatggaatatgtggaagggggagactgtgctactttaatgaaaaacatgggtcctctccctgttgatatggccagaatgtactttgctgagacggtcttggccttggaatatttacataattatggaattgtacacagggatttgaaaccagacaacttgttggttacctccatggggcacataaagctgacagattttggattatctaaggtgggactaatgagcatgactaccaacctttacgagggtcatattgagaaggatgctagagagttcctggataaacaggtctgtggcacacctgaatacattgcaccagaagtgattctgaggcagggttatggaaagccggtggactggtgggccatggggattatcctctatgaatttctggttggatgcgtgccattctttggggatactccagaggagctatttggacaagtcatcagtgatgagatcaactggcctgagaaggatgaggcacccccacctgatgcccaggatctgattaccttactcctcaggcagaatcccctggagaggctgggaacaggtggtgcatatgaagtcaaacagcatcgattcttccgttctttagactggaacagtttgctgagacagaaggcagaatttattccccaactggaatctgaggatgacacaagttattttgatactcggtctgagaagtatcatcatatggaaacggaggaagaagatgacacaaatgatgaagactttaatgtggaaataaggcagttttcttcatgttcacacaggttttcaaaagtaagtgaaatgtggcataaacatacagagtctctctgggaggatctcccgctggccagatagtatccccgaacagctggacacttaccgttttccagggtttgaggtctcctatgcttaaacttccttttgttgaagaaaagtgacctcctcaacttatagtctgtccctatcccctaggcctttagactgccattttaccttctctctttcctgtgagacaacagagattcagatagctgagaccttgggcttacctgagctctgatccccttcaggaaccccggcaccaatatatttctctctccacaaattaagatattgttttcttagaggcatagccttgcacccacagtcttgtttttggagtgtgtgactgctacttatatgatgaccttgccttgaacgtctctcacctggctcaatgccaggctgcagaggtatcactcattgctttcaactcaggatgaagagcgcgagcttcactgtgtacagagtcatctccgagggattacacagagtacaacaaaaggagaaggctcagtccttgacataagcaaagatatctgcggacagttgactgtaggattgtaaagtctcataactgccaggcatagtcgtcacgcctctaatcccagcacttagagaggcagaggcaagaagatagcgtaagcccagcagttcaagaccagcccgggcaatatagtgagaccccgttctccacaaaaaggaaaaaaaaagccaaaaaaaaaaagtcttgtaaccaataaacagaaattataagccatattgaaaaggcagtaggaagccaagctagaatcatttagataattgatgcttgagaaagatgcctttttaccagtacagtaaaagt

SEQ ID NO: 250 - DNA, 2485 bp, Homo sapien
gataagaggattggttggttctgtgagctcacactgagagataagctggtacctagttaacaatgggcattaacaaatgccccagagcaagttgatagttaaggatgtagaaaagagttctgagagtatcctataaacctccactggcccatatgcacctttgtggagttagaaacaggtagccctccagaagggcacagagctgagggagacttcgtgaaaatgagaaaaatggagtggaagcagcccagagccaggtgcaggcataaaaccatggaaagcagaccagatgttggttcctacttccctccttgcccagggcacaacctgaacagctacctgtggcatccctgcttaggcagacctctgggataagagtaaatttacagaccaggatctaatcctattatagccgccaactgtgtgccctcagtttcttcatctgtaaaaagacagagtttgacttcatagcctttgaaatataactgcttgaatatacttgctattttaccgcagtttggctctgtctctctctctctctttgtgtgtgtgtgtatgtgtgaaagagaaagagagagagagaaagagagagaaagagaaagagatgccttgtagtacttgaaaattagaattcttgataaaataaagctctaatttgttctagtgtttcttttcaacaaaccaggggttgccaagttttaaaacattttaaaatgcattagaggaagtgagtcagttacgttcttcatacactacaatggaagtacacttagttccaagttatgaatgctgtgaaaaattaggttcttttaataaatacaagatgaaactttcaggctttcaaaattcatgttctttctttccctccttattcatattagattgcttttgtaaagtatacagcactgcgatcttaaaaatgagcttttcgaaaataaaaatccaagtgcctatctcttgcatttccagttggtagtttcctatcatcgggtttgcctgttcacacaagtctttgcggcacaacggagtctgacttcccccaaattaatgcagttagtttattcctcgttctgatgattgccatatatagagaaagatctaattatttttatgtggcactattcctcatttatttcttggggactatgagtgatttagttaactccaccaagggaagtgtaagatgagcctcctcagggtggctgaattctattcgagagcatcacagggaggtggggaatagttgacgtgtgctgagataaactcttttacaagtatgacactgttgctttatttttttgccccagtctgcagggtgaaaaggacttttcatttcactgaggtgaaaagtgggtctgtgagtagagcgactttctttaaaaaaaaaaaaaaaaatcagaaaccaattacttgatatgcagagctgcaagcctcgttcctttaacaaaatcagtgcagtgtgcactgccgttaacctgaggaaagcagctgacatctcttgattacggctagaggtggaaggacccaaacttgcagcctccccctccccctcgagagagtgttagtccagtcctttagagaggttcggtttggctctctgtcatcaccgggacgctggcagggagtgtgtgtcatggttacaatagagtgtgctaacatataacaaccatgaaagcccagcgggaaaggctacagattccggggctgaccttggatctcactcccaggagcctgagtccaaccccatccagcccaggcagtccttgtagtcctctcttggcctttcacttttggaggtaagcatgctccagggcctgcccagggctgctttgtctttctgttgccccatttcccaccaccagcatttgattacttcagactctgcaatccacaatccacagggtgaggaaactggttgaattgtttacttggtgacttacttgatcacttactctatttagcatatttactcatatttcacttggtgtctcttgactcattgttcaatgtgtgtgtatatgtgacagtttttcattttgctttcttagggaatgatctgcactgaattctgtaagttttgatcaatataaagatataatttattggtttctagaaaacatttcctaattcctatgagagtattataatacctgttgcctcaaactattttatacactattatttacaggataatgtatttaaattgtctaaagtgttaatattttttaaatcattttttagaactccaaggtatatactcctaccccctcactcataggctgattatattcactcttctctgtttgttagagaaatatccccaaggaactcttacattttagcatagtttgttataagaatacacgatagaaaatactgctactatagtatctatggtatgtatattctaatagacttttcatgaattcactatttatggatatagtgaatcttcctgtatctaatcggaagacacacatagtgt

SEQ ID NO: 251 - DNA, 1011 bp, Homo sapien
caggtttatttttagtgcctgccttatctgagcagtaggcctggaatgattttataacctacctatttattttcctttaacctgtagcctgcttgtgtgtgtctgtatagctgaaagagactttgaagtaggtaagatacgaggttgggcttagaggaaagattaggttttggggtaagtggaacaagggtgtatggggtgggaaagggaatcaaaacaaaggcagagaaggtaaaaataactttcatatgtggggctgcttcctatgtcgttgaattagaaaaaataaaatggcaatgtatttagcatagtagtgaaaactccagcaggtggtatagcaacaagggaaacctgagcttcattgactccttgcatctcacctacttctaaaaaagactcaagtcatctacatgtagacagcacagtgtgtagaactactcattcatcctgtaaacatatattgattgccaataatgatcccacggtagaggctgggataccaagatgggtgacccatgaccttccctcaaggaaaacagacaaaaacagctgtaatataataacagaccagaggaaagaggattaattctgtctaattccatttcaccaggatgtagaagtttgaaaagttgtctatgaggaagagaggaggaggtagcgaggcatcccttgctggggagggcagggtcacagtgggagcagagtgcagggcaggtccctggggagcacagagctgggaagggcaaggaagaagtgttaagtgcagagtctggaaagggaaactgagcccaagcgggacttgacttttatagaaagtatggatccatatgttgttacacagagaaatacttgctctttattttagaaagaaaatctgtaaatgtgcatcatatcactctgtctttttctctgtttatttttagccctgtgtgtccaaatgctgggagaacatcaccccttggatgaattgccaccacattaaataaaacatatccaaagctcaaaaaaaaa

SEQ ID NO: 252 - DNA, 1552 bp, Homo sapien
gtgcagcgcgggagcacagtggagcgcagatcgcggacccgagcgggcatgtccccgcgcgcgggagcctccgtttgcggccgggcccgggcggctgtgaacttagcagcgggctcctgcggccccgtcactgccatgtagtcgctggcggggctccctgcagcccgggagcggcagtgccagtgagcctgagcccaggagcccgcgtcttccccgggaggcgctgagtgcgcgccgcgcccccgccgctcgggaggcactttgggccagacagggaaatgggggagaaagtttcggaggcgccagagccggtgccccgcggctgcagtggccacggcagccggactccagcctctgcgctggtcgccgcgtcctctccgggtgcttcctcggccgagtcctcctcgggctcagaaactctgtcggaggaaggggagcccggcggcttctccagagagcatcagccgccgccgccgccgccgttgggaggcaccctgggcgcccgggcgcccgccgcgtgggctccggcaagcgtgctgctggagcgcggagtccttgcgctgccgccgccgcttcccggaggagctgtgccgcccgcgccccggggcagcagcgcgtcccaggaggagcaggacgaggagcttgaccacatattatcccctccacccatgccgtttcggaaatgcagcaacccagatgtggcttctggccctggaaaatcactgaagtataaaagacagctgagtgaggatggaagacagctaaggcgagggagcctgggaggagccctgactgggaggtaccttcttccaaacccggtggcgggacaggcctggccggcctctgcagagacgtccaacctcgtgcgcatgcgcagccaggccctgggccagtcggcgccctcgctcaccgccagcctgaaggagctgagtctccccagaagaggaagtttgatagattcccagaagtggaattgcttggtcaaacgttgccgaacaagcaaccggaaaagcttaataggcaatgggcagtcaccagcattgcctcgaccacactcacctctctctgctcatgcaggaaatagccctcaagatagtccaagaaatttctcccccagtgcctcagcccatttttcatttgcacggaggactgatggacgccgctggtcgttggcttctctcccttcctctggctatgggacaaacacacccagctctacggtctctgtaagtgcctgactttttttttttttttctcttcctcacaacaacagagctatcacacaggcagtgttgttctctgggtgtttcctggtagggaggagaagataaattctgcatgtctgccactctgaataagtgacacactcaaatgatggcctgacaaaaataaaaaggacatagctttcgctgcaagcttttaaactgtagtgcataaattgagtaagttccaggatcacaagtttggaggaaactggaagctttcattttaataacatttggtgtagttcggggggaaaaacacaatctagttttattgctttaggttccat

SEQ ID NO: 253 - DNA, 1128 bp, Homo sapien
gtgcagcgcgggagcacagtggagcgcagatcgcggacccgagcgggcatgtccccgcgcgcgggagcctccgtttgcggccgggcccgggcggctgtgaacttagcagcgggctcctgcggccccgtcactgccatgtagtcgctggcggggctccctgcagcccgggagcggcagtgccagtgagcctgagcccaggagcccgcgtcttccccgggaggcgctgagtgcgcgccgcgcccccgccgctcgggaggcactttgggccagacagggaaatgggggagaaagtttcggaggcgccagagccggtgccccgcggctgcagtggccacggcagccggactccagcctctgcgctggtcgccgcgtcctctccgggtgcttcctcggccgagtcctcctcgggctcagaaactctgtcggaggaaggggagcccggcggcttctccagagagcatcagccgccgccgccgccgccgttgggaggcaccctgggcgcccgggcgcccgccgcgtgggctccggcaagcgtgctgctggagcgcggagtccttgcgctgccgccgccgcttcccggaggagctgtgccgcccgcgccccggggcagcagcgcgtcccaggaggagcaggacgaggagcttgaccacatattatcccctccacccatgccgtttcggaaatgcagcaacccagatgtggcttctggccctggaaaatcactgaagtataaaagacagctgagtgaggatggaagacagctaaggcgagggagcctgggaggagccctgactgggaggtaccttcttccaaacccggtggcgggacaggcctggccggcctctgcagagacgtccaacctcgtgcgcatgcgcagccaggccctgggccagtcggcgccctcgctcaccgccagcctgaaggagctgagtctccccagaagaggaagtttgtgcagaagcagtgattgtgactgggtaatagacaagagaagtgagagaaactgctttctaggcaagatgctgttatgagattgtcagccctgtgtgtccaaatgctgggagaacatcaccccttggatgaattgccaccacattaaataaaacatatccaaagctcaaaaaaaaa

SEQ ID NO: 254 - DNA, 1157 bp, Homo sapien
gtgcagcgcgggagcacagtggagcgcagatcgcggacccgagcgggcatgtccccgcgcgcgggagcctccgtttgcggccgggcccgggcggctgtgaacttagcagcgggctcctgcggccccgtcactgccatgtagtcgctggcggggctccctgcagcccgggagcggcagtgccagtgagcctgagcccaggagcccgcgtcttccccgggaggcgctgagtgcgcgccgcgcccccgccgctcgggaggcactttgggccagacagggaaatgggggagaaagtttcggaggcgccagagccggtgccccgcggctgcagtggccacggcagccggactccagcctctgcgctggtcgccgcgtcctctccgggtgcttcctcggccgagtcctcctcgggctcagaaactctgtcggaggaaggggagcccggcggcttctccagagagcatcagccgccgccgccgccgccgttgggaggcaccctgggcgcccgggcgcccgccgcgtgggctccggcaagcgtgctgctggagcgcggagtccttgcgctgccgccgccgcttcccggaggagctgtgccgcccgcgccccggggcagcagcgcgtcccaggaggagcaggacgaggagcttgaccacatattatcccctccacccatgccgtttcggaaatgcagcaacccagatgtggcttctggccctggaaaatcactgaagtataaaagacagctgagtgaggatggaagacagctaaggcgagggagcctgggaggagccctgactgggaggtaccttcttccaaacccggtggcgggacaggcctggccggcctctgcagagacgtccaacctcgtgcgcatgcgcagccaggccctgggccagtcggcgccctcgctcaccgccagcctgaaggagctgagtctccccagaagaggaagtttgatagattcccagaagtggaattgcttggtcaaacgtctcactcccaggagcctgagtccaaccccatccagcccaggcagtccttgtagtcctctcttggcctttcacttttggagccctgtgtgtccaaatgctgggagaacatcaccccttggatgaattgccaccacattaaataaaacatatccaaagctcaaaaaaaaa

SEQ ID NO: 255 - DNA, 1276 bp, Homo sapien
gtgcagcgcgggagcacagtggagcgcagatcgcggacccgagcgggcatgtccccgcgcgcgggagcctccgtttgcggccgggcccgggcggctgtgaacttagcagcgggctcctgcggccccgtcactgccatgtagtcgctggcggggctccctgcagcccgggagcggcagtgccagtgagcctgagcccaggagcccgcgtcttccccgggaggcgctgagtgcgcgccgcgcccccgccgctcgggaggcactttgggccagacagggaaatgggggagaaagtttcggaggcgccagagccggtgccccgcggctgcagtggccacggcagccggactccagcctctgcgctggtcgccgcgtcctctccgggtgcttcctcggccgagtcctcctcgggctcagaaactctgtcggaggaaggggagcccggcggcttctccagagagcatcagccgccgccgccgccgccgttgggaggcaccctgggcgcccgggcgcccgccgcgtgggctccggcaagcgtgctgctggagcgcggagtccttgcgctgccgccgccgcttcccggaggagctgtgccgcccgcgccccggggcagcagcgcgtcccaggaggagcaggacgaggagcttgaccacatattatcccctccacccatgccgtttcggaaatgcagcaacccagatgtggcttctggccctggaaaatcactgaagtataaaagacagctgagtgaggatggaagacagctaaggcgagggagcctgggaggagccctgactgggaggtaccttcttccaaacccggtggcgggacaggcctggccggcctctgcagagacgtccaacctcgtgcgcatgcgcagccaggccctgggccagtcggcgccctcgctcaccgccagcctgctttctcttttccttgtcttcaaacaaattgacatttgcggaggtgcgttgtgcagtagaacattcctcatgctgatgatcctctcctcctggcctctctgtctaccccttgcccctgtcgtagagctgtaagccatccttcccccgactccgcctgacatgtatcatggcacaccttcgtttttgttctttgtgtttatgtcgaatacctccctgctagactgcaagccccttgagggcagaattcttgtctgatttttactttctacttttcactgctctcaggacaatgccttgcacatagaaagcattcagtaaataatgttgaaggaataaataattatttatggaaaagt

SEQ ID NO: 256 - DNA, 1008 bp, Homo sapien
gtgcagcgcgggagcacagtggagcgcagatcgcggacccgagcgggcatgtccccgcgcgcgggagcctccgtttgcggccgggcccgggcggctgtgaacttagcagcgggctcctgcggccccgtcactgccatgtagtcgctggcggggctccctgcagcccgggagcggcagtgccagtgagcctgagcccaggagcccgcgtcttccccgggaggcgctgagtgcgcgccgcgcccccgccgctcgggaggcactttgggccagacagggaaatgggggagaaagtttcggaggcgccagagccggtgccccgcggctgcagtggccacggcagccggactccagcctctgcgctggtcgccgcgtcctctccgggtgcttcctcggccgagtcctcctcgggctcagaaactctgtcggaggaaggggagcccggcggcttctccagagagcatcagccgccgccgccgccgccgttgggaggcaccctgggcgcccgggcgcccgccgcgtgggctccggcaagcgtgctgctggagcgcggagtccttgcgctgccgccgccgcttcccggaggagctgtgccgcccgcgccccggggcagcagcgcgtcccaggaggagcaggacgaggagcttgaccacatattatcccctccacccatgccgtttcggaaatgcagcaacccagatgtggcttctggccctggaaaatcactgaagtataaaagacagctgagtgaggatggaagacagctaaggcgagggagcctgggaggagccctgactgggaggtaccttcttccaaacccggtggcgggacaggcctggccggcctctgcagagacgtccaacctcgtgcgcatgcgcagccaggccctgggccagtcggcgccctcgctcaccgccagcctgccctgtgtgtccaaatgctgggagaacatcaccccttggatgaattgccaccacattaaataaaacatatccaaagctcaaaaaaaaa

SEQ ID NO: 257 - DNA, 1369 bp, Homo sapien
ctactttcttgctttgtaagagtcacttgcacttttctggggcacagccaaactgacggtgctgtagaacaggatgtgcgagaatgctgtttggcaaacaaagagcgctctctggcccccagaggttctggcttttgagcccagactaaagaaagccaggctggagaccgtatatcaaactttgcaagcccgtttatataccttgctggtgcctcagggggcagaaatgctggttggggatctttgtgttttgttttgaaagagtgatgtttggaagcagaagcactcaaaaatatatcctgacctctggcacttagaacctccaccagagcttggcacttaactgttctgtttctcgtgatatgttctaattatctgtttccagccagattgtaaggtcaacaatggtagtttatttacgagtaagtcttagttttctcatctgtaggaatggggataaaaatgcaggtttgctatgagtgttaggggttcagggtttagttttgggcctaactgctcctgtctacctgtctacccttccagggcctctcaggacacaccttactcccaaagcacaatatccaaatggcaaagaggttgtccctttcttaatgagctccacaagcacctgaccaccaccccctcccattcgaggcctccctgtcccctcccgctgaacctaaaccgctctgaggagcagctctccagccatcagtcctgcttggatgaggatgctgattttgtgtctagggaaacaagtctgccccgtttgccttccacatggaggctgagagtacaagagaaagttgggggaaatagcaagcaaagttcagagggcagtggtccattttttcttatcagccacaaaacaaaaaataaataaaagaaggaggaggccgtgtctttgaggcacagtaagcctgcccactgaatgtccctgagagtaactagttataatagctactccttctacagggagacctagagacggggcagagagaggaaaggacgtgcccccgtgaatagcagaggggtgaacagtaggcctgggggagaaattgccttcctgacaagaagagttggagatgatgaatacaaaacccctgggacactgcctggcccatagtgatgttaccatcagtagtggctttgccgtttccagattgacatccatgccctaaacagagaactttgctgagatgaaatttccttgttggtatacttttgtgaaccactccattgagaaccagcacaaagccattgccttcttgaacgtcttcattaaaactagaataatctctgcccctcatttgcccatgcacatggaaaacccacggatatgccttccctgatggaaaatatgaccact

SEQ ID NO: 258 - DNA, 1588 bp, Homo sapien
tgagatggaatttcactcttgtcgcccagactagagtgcaatggcgtgacctcggctcggctcacggtagcccccgcctcccgggttcaagcgattctcccgcctcagcctcccaagtagctggaatcacaagcatgcaccaccacgcctggctaaccttgcatcttcagtagagacggggtttctccatactggtcaggctggtctcgaactccagtcagtggtcatattttccatcagggaaggcatatccgtgggttttccatgtgcatgggcaaatgaggggcagagattattctagttttaatgaagacgttcaagaaggcaatggctttgtgctggttctcaatggagtggttcacaaaagtataccaacaaggaaatttcatctcagcaaagttctctgtttagggcatggatgtcaatctggaaacggcaaagccactactgatggtaacatcactatgggccaggcagtgtcccaggggttttgtattcatcatctccaactcttcttgtcaggaaggcaatttctcccccaggcctactgttcacccctctgctattcacgggggcacgtcctttcctctctctgccccgtctctaggtctccctgtagaaggagtagctattataactagttactctcagggacattcagtgggcaggcttactgtgcctcaaagacacggcctcctccttctttttttttttttttgttttgtggctgataagaaaaaatggaccactgccctctgaactttgcttgctatttcccccaactttctcttgtactctcagcctccatgtggaaggcaaacggggcagacttgtttccctagacacaaaatcagcatcctcatccaagcaggactgatggctggagagctgctcctcagagcggtttaggttcagcgggaggggacagggaggcctcgaatgggagggggtggtggtcaggtgcttgtggagctcattaagaaagggacaacctctttgccatttggatattgtgctttgggagtaaggtgtgtcctgagaggccctggaagggtagacaggtagacaggagcagttaggcccaaaactaaaccctgaacccctaacactcatagcaaacctgcatttttatccccattcctacagatgagaaaactaagacttactcgtaaataaactaccattgttgaccttacaatctggctggaaacagataattagaacatatcacgagaaacagaacagttaagtgccaagctctggtggaggttctaagtgccagaggtcatgatatatttttgagtgcttctgcttccaaacatcactctttcaaaacaaaacacaaagatccccaaccagcatttctgccccctgaggcaccagcaaggtatataaacgggcttgcaaagtttgatatacggtctccagcctggctttctttagtctgggctcaaaagccagaacctctgggggccagagagcgctctttgtttgccaaacagcattctcgcacatcctgttctacagcaccgtcagtttggctgtgccccagaaaagtgcaagtgactcttacaaagcaagaaagtag

SEQ ID NO: 259 - DNA, 1588 bp, Homo sapien
ctactttcttgctttgtaagagtcacttgcacttttctggggcacagccaaactgacggtgctgtagaacaggatgtgcgagaatgctgtttggcaaacaaagagcgctctctggcccccagaggttctggcttttgagcccagactaaagaaagccaggctggagaccgtatatcaaactttgcaagcccgtttatataccttgctggtgcctcagggggcagaaatgctggttggggatctttgtgttttgttttgaaagagtgatgtttggaagcagaagcactcaaaaatatatcctgacctctggcacttagaacctccaccagagcttggcacttaactgttctgtttctcgtgatatgttctaattatctgtttccagccagattgtaaggtcaacaatggtagtttatttacgagtaagtcttagttttctcatctgtaggaatggggataaaaatgcaggtttgctatgagtgttaggggttcagggtttagttttgggcctaactgctcctgtctacctgtctacccttccagggcctctcaggacacaccttactcccaaagcacaatatccaaatggcaaagaggttgtccctttcttaatgagctccacaagcacctgaccaccaccccctcccattcgaggcctccctgtcccctcccgctgaacctaaaccgctctgaggagcagctctccagccatcagtcctgcttggatgaggatgctgattttgtgtctagggaaacaagtctgccccgtttgccttccacatggaggctgagagtacaagagaaagttgggggaaatagcaagcaaagttcagagggcagtggtccattttttcttatcagccacaaaacaaaaaataaataaaagaaggaggaggccgtgtctttgaggcacagtaagcctgcccactgaatgtccctgagagtaactagttataatagctactccttctacagggagacctagagacggggcagagagaggaaaggacgtgcccccgtgaatagcagaggggtgaacagtaggcctgggggagaaattgccttcctgacaagaagagttggagatgatgaatacaaaacccctgggacactgcctggcccatagtgatgttaccatcagtagtggctttgccgtttccagattgacatccatgccctaaacagagaactttgctgagatgaaatttccttgttggtatacttttgtgaaccactccattgagaaccagcacaaagccattgccttcttgaacgtcttcattaaaactagaataatctctgcccctcatttgcccatgcacatggaaaacccacggatatgccttccctgatggaaaatatgaccactgactggagttcgagaccagcctgaccaatatggagaaaccccatctctactaaaaatacaaaattagccaggcgtggtggtgcatgcttgtaattccagctacttgggaggctgaggcaggagaatcacttgaacccaggaggcaggggctaccgtgagccgagccgagatcacgccattgcactctagtctgggcaacaagagtgaaattccatctca

SEQ ID NO: 260 - DNA, 1019 bp, Homo sapien
ctactttcttgctttgtaagagtcacttgcacttttctggggcacagccaaactgacggtgctgtagaacaggatgtgcgagaatgctgtttggcaaacaaagagcgctctctggcccccagaggttctggcttttgagcccagactaaagaaagccaggctggagaccgtatatcaaactttgcaagcccgtttatataccttgctggtgcctcagggggcagaaatgctggttggggatctttgtgttttgttttgaaagagtgatgtttggaagcagaagcactcaaaaatatatcctgacctctggcacttagaacctccaccagagcttggcacttaactgttctgtttctcgtgatatgttctaattatctgtttccagccagattgtaaggtcaacaatggtagtttatttacgagtaagtcttagttttctcatctgtaggaatggggataaaaatgcaggtttgctatgagtgttaggggttcagggtttagttttgggcctaactgctcctgtctacctgtctacccttccagggcctctcaggacacaccttactcccaaagcacaatatccaaatggcaaagaggttgtccctttcttaatgagctccacaagcacctgaccaccaccccctcccattcgaggcctccctgtcccctcccgctgaacctaaaccgctctgaggagcagctctccagccatcagtcctgcttggatgaggatgctgattttgtgtctagggaaacaagtctgccccgtttgccttccacatggaggctgagagtacaagagaaagttgggggaaatagcaagcaaagttcagagggcagtggtccattttttcttatcagccacaaaacaaaaaataaataaaagaaggaggaggccgtgtctttgaggcacagtaagcctgcccactgaatgtccctgagagtaactagttatagactctctaaggagatagacggagagagaggaagacggccccgtgatgaaaaccctgctggga

SEQ ID NO: 261 - DNA, 964 bp, Homo sapien
gcaaaatagatggagagtttggtgctaaccgcggaataaactcttggcaaatacttttggactggattgttactgcagttgttgtcttgttatgggcgttttgccctttggaggtcactggagatcaagggtggccacatagcgagacaatgcagagatatgatttgaggaggaaaagaaagagcaaaaagggaattggggtgttatgaggaagaaaagacggactagaagtataagaatgagggatctgtacgaggttggaaaaaggccagagtggtttcatttgttccactgttttagctattacatcaacgaaggcatagcactctaactctagtgattttgttgctaagctttttattcacgaagaattctgaaggacgagattactagggcctgaaaatatgacacctccttccactctaagacaattaaaaccagcagtggaactattaaccatattaaccagagaaatcctggatttcaaacctttggagtaactgtaaggtttcgtcattcttgggactcattccatagcctttgccaacatctgttgccagcatcttaactaacactgagtcactaaactatacccaatttccaaactgtattaattccacagtgtcctggtttggggtgtgtttggggatagggtatgtcaaaagtgcaaaaaacaacaacaaaaaatatcttgcacattgttacattttttttaagacaatgtaacaatgtgcaagatatttcaaagctggagaaacagaggaaaagtaaagggcaaattaccaggaggcaagagatgttaatgaagagaaaaaggtagtgtttaataaatatcaaactgctttggaggtaaagtctattttgatattgggccagactcttttttggacttggggtagaattctatttcttatcctacgtgagtgctgggagaatgtgaatttctgcttgagttctagtagtg

SEQ ID NO: 262 - DNA, 1851 bp, Homo sapien
  misc_feature (230)..(230): n=a, c, g or t
  misc_feature (1315)..(1337): n=a, c, g or t
tagaggctgccttatgctgtctcatccagttcctttgcggtcctcttcttcagcacatgccaaagctgttcctcacggcctgtgagacaagagcatcttggatgtaggacaatggaagagttaggtgagtgaggagcctgaggagaaactctgagggagtgaagacttggctgccatctccttgtgtggtggggtatacttctggctagaatgaaggtagtaaaggcaanttttattttcacttctttcctgtcctcagccctgccaagagtgaagcatgaggaactatgattgttttggggaactatgggttcactgtttgcagtggcaaaatagatggagagtttggtgctaaccgcggaataaactcttggcaaatacttttggactggattgttactgcagttgttgtcttgttatgggcgttttgccctttggaggtcactggagatcaagggtggccacatagcgagacaatgcagagatatgatttgaggaggaaaagaaagagcaaaaagggaattggggtgttatgaggaagaaaagacggactagaagtataagaatgagggatctgtacgaggttggaaaaaggccagagtggtttcatttgttccactgttttagctattacatcaacgaaggcatagcactctaactctagtgattttgttgctaagctttttattcacgaagaattctgaaggacgagattactagggcctgaaaatatgacacctccttccactctaagacaattaaaaccagcagtggaactattaaccatattaaccagagaaatcctggatttcaaacctttggagtaactgtaaggtttcgtcattcttgggactcattccatagcctttgccaacatctgttgccagcatcttaactaacactgagtcactaaactatacccaatttccaaactgtattaattccacagtgtcctggtttggggtgtgtttggggatagggtatgtcaaaagtgcaaaaaacaacaacaaaaaatatcttgcacattgttacattttttttaagacaatgtaacaatgtgcaagatatttcaaagctggagaaacagaggaaaagtaaagggcaaattaccaggaggcaagagatgttaatgaagagaaaaaggtagtgtttaataaatatcaaactgctttggaggtaaagtctattttgatattgggccagactcttttttggacttggggtagaattctatttcttatcctacgtgagtgctgggagaatgtgaatttctgcttgagttctagtagtgctagggccttttttctttttctcnnnnnnnnnnnnnnnnnnnnnnnaggggacaccgaaaggctttcatggcaaataattcaaaaggaaactaatacttatttagtaaatcaagcaaaaactagacatttttacatatgttaatcattttagtgtctgcagcaaccctctgaaataggtgttatccacttctttttcagatgagaaaactaagaaaaacaaaataactttttcaatgtcactgtcgggaacacctgacaccaaaactaagcaacaagggtatcactcctttggcccaggctgctggagtgtggtggcgtgatctcgactcatcgcaggctcacctaggctcagatgccttattggaggaactggaacgctccacccttcaggacagtgatgaatattccaacccagctcctcttcccctggatcagcattccagaaaggagactaaccttgatgagacttcggagatcctttctattcaggataacacaagtcccttgccggcgcagctcgtgtatactaccaatatccaggagctcaatgtctacagtg

SEQ ID NO: 263 - DNA, 1348 bp, Homo sapien
aaaaaaagctcaccaaatcaaaagagaggaagtgctaagcaaatacaggaaccaaaaaggtttatagaggctgccttatgctgtctcatccagttcctttgcggtcctcttcttcagcacatgccaaagctgttcctcacggcctgtgagacaagagcatcttggatgtaggacaatggaagagttaggtgagtgaggagcctgaggagaaactctgagggagtgaagacttggctgccatctccttgtgtggtggggtatacttctggctagactgagggtagtaatggaagattttattttcacttctttcctgtcctcagccctgccaagagtgaagcatgaggaactatgattgttttggggaactatgggttcactgtttgcagtggcaaaatagatggagagtttggtgctaaccgcggaataaactcttggcaaatacttttggactggattgttactgcagttgttgtcttgttatgggcgttttgccctttggaggtcactggagatcaagggtggccacatagcgagacaatgcagagatatgatttgaggaggaaaagaaagagcaaaaagggaattggggtgttatgaggaagaaaagacggactagaagtataagaatgagggatctgtagaggttggaaaaaggccagagtggtttcatttgttccatgttttagtattaaatcaagaaggcatagcactctaactctagtgattttgttgctaagctttttattcagaagaattctgaaggaagagattactagggcctgaaaatatgacacctccttccactctaagacaattaaaaccagcagtggaactattaaccatattaaccagagaaatcctggatttcaaacctttggagtaatgtaaggtttgtcattcttgggactcattccatagcctttgccaacatctgttgccagcatcttaactaacactgagtcactaaactatacccaatttccaaactgtattaattccacagtgtcctggtttggggtgtgtttggggatagggtatgtcaaaagtgcaaaaaacaacaacaaaaaatatcttgcacattgttacattttttttaagacaatgtaacaatgtgcaagatatttcaaagctggagaaacagaggaaaagtaaagggcaaattaccaggaggcaagagatgttaatgaagagaaaaaggtagtgtttaataaatatcaaactgctttggaggtaaagtctattttgatattgggccagactcttttttggacttggggtagaattctatttcttatcctacgtgagtgctgggagaatgtgaatttctgcttgagttctagtagtg

SEQ ID NO: 264 - DNA, 334 bp, Homo sapien
aaaaaaagctcaccaaatcaaaagagaggaagtgctaagcaaatacaggaaccaaaaaggtttatagaggctgccttatgctgtctcatccagttcctttgcggtcctcttcttcagcacatgccaaagctgttcctcacggcctgtgagacaagagcatcttggatgtaggacaatggaagagttagattgctatggaagactggaaagcttcaacctttcaggacaatggatgaataattccaaaccagttcttttcccctggatagcttcagaaaggggtaactttagaattgaatcttcaatggttaaccatcctttgcggggaatcgga

SEQ ID NO: 265 - DNA, 2238 bp, Homo sapien
aaaaaaagctcaccaaatcaaaagagaggaagtgctaagcaaatacaggaaccaaaaaggtttatagaggctgccttatgctgtctcatccagttcctttgcggtcctcttcttcagcacatgccaaagctgttcctcacggcctgtgagacaagagcatcttggatgtaggacaatggaagagttagatgccttattggaggaactggaacgctccacccttcaggacagtgatgaatattccaacccagctcctcttcccctggatcagcattccagaaaggagactaaccttgatgagacttcggagatcctttctattcaggataacacaagtcccttgccggcgcagctcgtgtatactaccaatatccaggagctcaatgtctacagtgaagcccaagagccaaaggaatcaccaccaccttctaaaacgtcagcagctgctcagttggatgagctcatggctcacctgactgagatgcaggccaaggttgcagtgagagcagatgctggcaagaagcacttaccagacaagcaggatcacaaggcctccctggactcaatgcttgggggtctcgagcaggaattgcaggaccttggcattgccacagtgcccaagggccattgtgcatcctgccagaaaccgattgctgggaaggtgatccatgctctagggcaatcatggcatcctgagcattttgtctgtactcattgcaaagaagagattggctccagtcccttctttgagcggagtggcttggcctactgccccaacgactaccaccaacttttttctccacgctgtgcttactgcgctgctcccatcctggataaagtgctgacagcaatgaaccagacctggcacccagagcacttcttctgctctcactgcggagaggtgtttggtgcagaaggctttcatgagaaggacaagaagccatattgccgaaaggatttcttagccatgttctcacccaagtgtggtggctgcaatcgcccagtgttggaaaactacctttcagccatggacactgtctggcacccagagtgctttgtttgtggggtctgtataatcacttttctttcggacttagggaaagtcaagggttctcctctctgagaggaagagctgcagttagtgaaagggttcacagtcctgaatgaggaatggatgtgcgcatcctaaaggagaaacgagatacagatccatttgcttgtctgttttgcaagcgggaaatctagtctccatttgtcaagaacctgagggaaattcctgtagctggcaggtaactgtcaggaatttcaaggctgaaaattttactttgctgacattttacctcttgacatttgcattctttttctctctcttctctctaccccaggactgcttcaccagtttttctactggctccttctttgaactggatggacgtccattctgtgagctccattaccatcaccgccggggaacgctctgccatgggtgtgggcagcccatcactggccgttgtatcagtgccatggggtacaagttccatcctgagcactttgtgtgtgctttctgcctgacacagttgtcgaagggcattttcagggagcagaatgacaagacctattgtcaaccttgcttcaataagctcttcccactgtaatgccaactgatccatagcctcttcagattccttataaaatttaaaccaagagaggagaggaaagggtaaattttctgttactgaccttctgcttaatagtcttatagaaaaaggaaaggtgatgagcaaataaaggaacttctagactttacatgactaggctgataatcttattttttaggcttctatacagttaattctataaattctctttctccctctcttctccaatcaagcacttggagttagatctaggtccttctatctcgtccctctacagatgtattttccacttgcataattcatgccaacactggttttcttaggtttctccattttcacctctagtgatggccctactcatatcttctctaatttggtcctgatacttgtttcttttcacgttttcccatttccctgtggctcactgtcttacaatcactgctgtggaatcatgataccacttttagctctttgcatcttccttcagtgtatttttgtttttcaagaggaagtagattttaactggacaactttgagtactgacatcattgataaataaactggcttgtggtttcaataa

SEQ ID NO: 266 - DNA, 2416 bp, Homo sapien
gagacagagtctcactatctcccaggctggagtgcagtggtgcgatctcggctcactgcaagctctgcctcccgggtttacgccattctcctgcctcagcctcccaagtagctgggactacaggcgctcgccaccacacctggctaattttttgtatttttagtagagacggggtttcaccgtgttagccaggatggtctcgatctcctgacctcgtgatccacccgcctcggcctcccaaagtgctgggattacaggtgcaagccaccgtgcccggccaattttttcactttttaattatgtacaacaatagttgaaaccatacatatactcaggagtggaatataattagcaaatattttcttcagattgttatttgtctttgtttatggtgattttttgacatgtgtaagtcattcagatatatttttatgtagctaaatttattaatatttaacttgcttttggaatttgggctttatttatgacagtttttctgtttccagattaaagaggaatacatcattaatgacaagatatgaaatgcaaatgcacacattaaaaaaaccctaagtatcattagcctttcgggaaatacaaatcaaaactaccatgagataacattgtatagatagataacatccatttgattgattaaaaaggaaatatatggatatatcaagtgatgtaaagactgaggaataattgggattttcatacactgctggtaaacaataaaaataatatacccacacaaaaaataaaaaaaggaggaatacatctatttttaattcaaatatatggtatgagtcattgtgtttagatcttgcatccatctggaaattattatttagtagtattttattttaaaatatcagatgctttttttcttcccagatgctgttttagatattagagatataatggtgacaagatcaacaatatctagtttctctcagagctaatgttcctgtaaggggagacagcccacaaagatgattttaaataaaggtaaatgccataaagacggtgaaagaagatgatgtgacaaggagggactgaagagatgcctctctgataagatgatatttgagtgattcttgcatcacatgaagaggacaactatatcaggctctgggacagaactatccaagccaagggaatacttagtacaaaggcactgaggagcaatagcccctaacacttattaaatgtttactatgaaccagacacaatgccaaaacacttcctctgcattatctcatttatttcttacaactaccctttgaattaggtaacagtaatcatcctattttgaatatgaggacacagattgaaagggcctcctctcagtctccagtgtagctttcagggctcaacctgcaacagtgaattcctgattttatctctccaggctttcatgagaaggacaagaagccatattgccgaaaggatttcttagccatgttctcacccaagtgtggtggctgcaatcgcccagtgttggaaaactacctttcagccatggacactgtctggcacccagagtgctttgtttgtggggactgcttcaccagtttttctactggctccttctttgaactggatggacgtccattctgtgagctccattaccatcaccgccggggaacgctctgccatgggtgtgggcagcccatcactggccgttgtatcagtgccatggggtacaagttccatcctgagcactttgtgtgtgctttctgcctgacacagttgtcgaagggcattttcagggagcagaatgacaagacctattgtcaaccttgcttcaataagctcttcccactgtaatgccaactgatccatagcctcttcagattccttataaaatttaaaccaagagaggagaggaaagggtaaattttctgttactgaccttctgcttaatagtcttatagaaaaaggaaaggtgatgagcaaataaaggaacttctagactttacatgactaggctgataatcttattttttaggcttctatacagttaattctataaattctctttctccctctcttctccaatcaagcacttggagttagatctaggtccttctatctcgtccctctacagatgtattttccacttgcataattcatgccaacactggttttcttaggtttctccattttcacctctagtgatggccctactcatatcttctctaatttggtcctgatacttgtttcttttcacgttttcccatttccctgtggctcactgtcttacaatcactgctgtggaatcatgataccacttttagctctttgcatcttccttcagtgtatttttgtttttcaagaggaagtagattttaactggacaactttgagtactgacatcattgataaataaactggcttgtggtttcaataa

SEQ ID NO: 267 - DNA, 2735 bp, Homo sapien
gagacagagtctcactatctcccaggctggagtgcagtggtgcgatctcggctcactgcaagctctgcctcccgggtttacgccattctcctgcctcagcctcccaagtagctgggactacaggcgctcgccaccacacctggctaattttttgtatttttagtagagacggggtttcaccgtgttagccaggatggtctcgatctcctgacctcgtgatccacccgcctcggcctcccaaagtgctgggattacaggtgcaagccaccgtgcccggccaattttttcactttttaattatgtacaacaatagttgaaaccatacatatactcaggagtggaatataattagcaaatattttcttcagattgttatttgtctttgtttatggtgattttttgacatgtgtaagtcattcagatatatttttatgtagctaaatttattaatatttaacttgcttttggaatttgggctttatttatgacagtttttctgtttccagattaaagaggaatacatcattaatgacaagatatgaaatgcaaatgcacacattaaaaaaaccctaagtatcattagcctttcgggaaatacaaatcaaaactaccatgagataacattgtatagatagataacatccatttgattgattaaaaaggaaatatatggatatatcaagtgatgtaaagactgaggaataattgggattttcatacactgctggtaaacaataaaaataatatacccacacaaaaaataaaaaaaggaggaatacatctatttttaattcaaatatatggtatgagtcattgtgtttagatcttgcatccatctggaaattattatttagtagtattttattttaaaatatcagatgctttttttcttcccagatgctgttttagatattagagatataatggtgacaagatcaacaatatctagtttctctcagagctaatgttcctgtaaggggagacagcccacaaagatgattttaaataaaggtaaatgccataaagacggtgaaagaagatgatgtgacaaggagggactgaagagatgcctctctgataagatgatatttgagtgattcttgcatcacatgaagaggacaactatatcaggctctgggacagaactatccaagccaagggaatacttagtacaaaggcactgaggagcaatagcccctaacacttattaaatgtttactatgaaccagacacaatgccaaaacacttcctctgcattatctcatttatttcttacaactaccctttgaattaggtaacagtaatcatcctattttgaatatgaggacacagattgaaagggcctcctctcagtctccagtgtagctttcagggctcaacctgcaacagtgaattcctgattttatctctccaggctttcatgagaaggacaagaagccatattgccgaaaggatttcttagccatgttctcacccaagtgtggtggctgcaatcgcccagtgttggaaaactacctttcagccatggacactgtctggcacccagagtgctttgtttgtggggtctgtataatcacttttctttcggacttagggaaagtcaagggttctcctctctgagaggaagagctgcagttagtgaaagggttcacagtcctgaatgaggaatggatgtgcgcatcctaaaggagaaacgagatacagatccatttgcttgtctgttttgcaagcgggaaatctagtctccatttgtcaagaacctgagggaaattcctgtagctggcaggtaactgtcaggaatttcaaggctgaaaattttactttgctgacattttacctcttgacatttgcattctttttctctctcttctctctaccccaggactgcttcaccagtttttctactggctccttctttgaactggatggacgtccattctgtgagctccattaccatcaccgccggggaacgctctgccatgggtgtgggcagcccatcactggccgttgtatcagtgccatggggtacaagttccatcctgagcactttgtgtgtgctttctgcctgacacagttgtcgaagggcattttcagggagcagaatgacaagacctattgtcaaccttgcttcaataagctcttcccactgtaatgccaactgatccatagcctcttcagattccttataaaatttaaaccaagagaggagaggaaagggtaaattttctgttactgaccttctgcttaatagtcttatagaaaaaggaaaggtgatgagcaaataaaggaacttctagactttacatgactaggctgataatcttattttttaggcttctatacagttaattctataaattctctttctccctctcttctccaatcaagcacttggagttagatctaggtccttctatctcgtccctctacagatgtattttccacttgcataattcatgccaacactggttttcttaggtttctccattttcacctctagtgatggccctactcatatcttctctaatttggtcctgatacttgtttcttttcacgttttcccatttccctgtggctcactgtcttacaatcactgctgtggaatcatgataccacttttagctctttgcatcttccttcagtgtatttttgtttttcaagaggaagtagattttaactggacaactttgagtactgacatcattgataaataaactggcttgtggtttcaataa

SEQ ID NO: 268 - DNA, 951 bp, Homo sapien
ccagtttttctacaccaaacacctctgcgcagtgagagcagaagaagtgctctgggtgccaggtctggttcattgctgagaggtgtttggtgcagaaggactgcttcaccagtttttctactggctccttctttgaactggatggacgtccattctgtgagctccattaccatcaccgccggggaacgctctgccatgggtgtgggcagcccatcactggccgttgtatcagtgccatggggtacaagttccatcctgagcactttgtgtgtgctttctgcctgacacagttgtcgaagggcattttcagggagcagaatgacaagacctattgtcaaccttgcttcaataagctcttcccactgtaatgccaactgatccatagcctcttcagattccttataaaatttaaaccaagagaggagaggaaagggtaaattttctgttactgaccttctgcttaatagtcttatagaaaaaggaaaggtgatgagcaaataaaggaacttctagactttacatgactaggctgataatcttattttttaggcttctatacagttaattctataaattctctttctccctctcttctccaatcaagcacttggagttagatctaggtccttctatctcgtccctctacagatgtattttccacttgcataattcatgccaacactggttttcttaggtttctccattttcacctctagtgatggccctactcatatcttctctaatttggtcctgatacttgtttcttttcacgttttcccatttccctgtggctcactgtcttacaatcactgctgtggaatcatgataccacttttagctctttgcatcttccttcagtgtatttttgtttttcaagaggaagtagattttaactggacaactttgagtactgacatcattgataaataaactggcttgtggtttcaataa

SEQ ID NO: 269 - DNA, 395 bp, Homo sapien
  misc_feature (269)..(269): n=a, c, g or t
attcaatcaaggtagttctttaagaaatagttgtattattgttctttcttaaaaatcagtcattttatctgacaagttacttctttatttatgtcaaaagtagaagacgagatgggggcttcaagatggcttactagagatgcctggcacttgcctcctccacaaagagaaattaagcatgaatagataatcacatgtccaatagagcattgaagaatactggaattcaggagggaagggacagggaccctctgaggcatggaaggagnaaaaagcaaagcagctggcctggctgagattggcttgaagccaggagggactccccattgtggggaaaggtaagctagagattcccaacagtccacatccccactgtaggtagactcctgaaatcc

SEQ ID NO: 270 - DNA, 395 bp, Homo sapien
attcaatcaaggtagttctttaagaaatagttgtattattgttctttcttaaaaatcagtcattttatctgacaagttacttctttatttatgtcaaaagtagaagacgagatgggggcttcaagatggcttactagagatgcctggcacttgcctcctccacaaagagaaattaagcatgaatagataatcacatgtccaatagagcattgaagaatactggaattcaggagggaagggacagggaccctctgaggcatggaaggagaaaaaagcaaagcagctggcctggctgagattggcttgaagccaggagggactccccattgtggggaaaggtaagctagagattcccaacagtccacatccccactgtaggtagactcctgaaatcc

SEQ ID NO: 271 - DNA, 203 bp, Homo sapien
atttttttcaatagtccttgttatcacacaacatgtaatgcttattcgattacttcagttgtcttttgtttctccaactagactgatggctttgtcatagcaaggattttgcttattcagtgccaaatcctagttcaatgcttggcacaagaaattgcttgtcttaatttgtctgtgtggctataacaaaatatctgaaatac

SEQ ID NO: 272 - DNA, 400 bp, Homo sapien
atttttttcaatagtccttgttatcacacaacatgtaatgcttattcgattacttcagttgtcttttgtttctccaactagactgatggctttgtcatagcaaggattttgcttattcagtgccaaatcctagttcaatgcttggcacaagaaattgcttgtcttaatttgtctgtgtggctataacaaaatatctgaaatacataatttgtaaagaacagaaatttatttctcacagttctggaggctggcaagtccaagatcagagaggttgcttgtgaaggccactctctgcttccaagatggctcccctcatggtggggaggaatactgtgtcctcacatggcagaaggcagaagggcaagagagccaaatacctttaaaaaaaaaaaggaaaaag

SEQ ID NO: 273 - DNA, 561 bp, Homo sapien
  misc_feature (135)..(169): n=a, c, g or t
ctgagctactgccccctaccctctttgcgtcttaggagtcatttagattttttttgatccttttgtttagtgcctctggagctgcttacaccaaggcaatacgccttgatatactggatggttgagaggcagccnnnnnnnnnnnnnnnnnnnnnnnnnnnnnnnnnnnagtatggctgttgtgaaaagggaggtaaagagaaatggtagatctgaagaggcctcatcagagcacatattttaggacaacacatatggaaattggacatctttaagttggtttccatagagctatgcatgtatccttacccccatgggaaaatgttggtgtgttctcaagggtatgcatgtgtcattttgaagaccaaggccctagaattgtcaaacttaaggatcataaaaatcatgagggttgcttgttaaaaatgtccaaacgtgcagagactgatctttgagatctggaccaggaatttgcatttgaacaagtgttcctggaatctctatgcaagttttatacagaacatacttttggaatccttgccctagacaggggtgtccaat

SEQ ID NO: 274 - DNA, 1058 bp, Homo sapien
cttaatttaattagccaaatcagacttaacttccgtcagaacatgtcttggttttaattcagataaacacacaaacatacttctctggcacagccttcagaagcatcagtttttgttttgttttgttttgttttttgagacagggtcttgctctgttgcccaggctggagtgcactggcacaatcacagttcactgcagcctcgacctcccagatccaagcaatcctcccacctaagcctcccaagtagctgggtctataggcgcgtgccaccaccatgcccagctgaattttgtattttttgtacagacagcattttgccatgttgcccaggctggtcccaaacttctagcctcaagcaaccctcctgcctcagcctctcaaagtgctaggattgcagtcctgagctactgccccctaccctctttgcgtcttaggagtcatttagattttttttgatccttttgtttagtgcctctggagctgcttacaccaaggcaatacgccttgatatactggatggttgagaggcagcctcttttttttttttttttttttttggaggatagggagtatggctgttgtgaaaagggaggtaaagagaaatggtagatctgaagaggcctcatcagagcacatattttaggacaacacatatggaaattggacatctttaagttggtttccatagagctatgcatgtatccttacccccatgggaaaatgttggtgtgttctcaagggtatgcatgtgtcattttgaagaccaaggccctagaattgtcaaacttaaggatcataaaaatcatgagggttgcttgttaaaaatgtccaaacgtgcagagactgatctttgagatctggaccaggaatttgcatttgaacaagtgttcctggaatctctatgcaagttttatacagaacatacttttggaatccttgccctagacaggggtgtccaatcttttggcttccctggtccacaatggaagaagaattgtcttggaccacacataaaatacactaacactaacaatagctgatgagctaaaaaaaaaa

SEQ ID NO: 275 - DNA, 231 bp, Homo sapien
cttgagcaactatgcttggctcaaagatatttttatgaaagccctgggactatagatttagctgattaaatttatagaaaaagtcctgtcatataaactggcaaagtctgttcttaatttaattagccaaatcagacttaacttccgtcagaacatgtcttggttttaattcagataaacacacaaacatacttctctggcacagccttcagaagcatcagttttggtgtg

SEQ ID NO: 276 - DNA, 1239 bp, Homo sapien
caggctggtctcgaactcctgggtttaagtgattccccgcctcagctcccaaagttttgggcttacagccttgagccactatgcttggctcaaagatatttttatgaaagccctgggactatagatttagctgattaaatttatagaaaaagtcctgtcatataaactggcaaagtctgttcttaatttaattagccaaatcagacttaacttccgtcagaacatgtcttggttttaattcagataaacacacaaacatacttctctggcacagccttcagaagcatcagtttttgttttgttttgttttgttttttgagacagggtcttgctctgttgcccaggctggagtgcactggcacaatcacagttcactgcagcctcgacctcccagatccaagcaatcctcccacctaagcctcccaagtagctgggtctataggcgcgtgccaccaccatgcccagctgaattttgtattttttgtacagacagcattttgccatgttgcccaggctggtcccaaacttctagcctcaagcaaccctcctgcctcagcctctcaaagtgctaggattgcagtcctgagctactgccccctaccctctttgcgtcttaggagtcatttagattttttttgatccttttgtttagtgcctctggagctgcttacaccaaggcaatacgccttgatatactggatggttgagaggcagcctcttttttttttttttttttttttggaggatagggagtatggctgttgtgaaaagggaggtaaagagaaatggtagatctgaagaggcctcatcagagcacatattttaggacaacacatatggaaattggacatctttaagttggtttccatagagctatgcatgtatccttacccccatgggaaaatgttggtgtgttctcaagggtatgcatgtgtcattttgaagaccaaggccctagaattgtcaaacttaaggatcataaaaatcatgagggttgcttgttaaaaatgtccaaacgtgcagagactgatctttgagatctggaccaggaatttgcatttgaacaagtgttcctggaatctctatgcaagttttatacagaacatacttttggaatccttgccctagacaggggtgtccaatcttttggcttccctggtccacaatggaagaagaattgtcttggaccacacataaaatacactaacactaacaatagctgatgagctaaaaaaaaaa

SEQ ID NO: 277 - DNA, 657 bp, Homo sapien
cgtgtgggaggccggaagttgcggcttcattactcgccatttcaaaatgctgccgaggccctaggatctgtgactgccacccctccccccacccgggctcggcgggggagcgactcatggagctgccgtaagttttaccaacagactgcagtttcttcactaccaaaatgacatcattttccacctctgctcagtgttcaacatctgacagtgcttgcaggatctctcctggacaaatcaatcaggtacgaccaaaactgccgcttttgaagattttgcatgcagcaggtgcgcaaggtgaaatgttcactgttaaagaggtcatgcactatttaggtcagtacataatggtgaagcaactttatgatcagcaggagcagcatatggtatattgtggtggagatcttttgggagaactactgggacgtcagagcttctccgtgaaagacccaagccctctctatgatatgctaagaaagaatcttgtcactttagccactgctactacaggtatgtcacatcatatttcttcagtctgtatcacagctttgagttcaagggggcaaatgatgggaaaacaaagaagatgaaggtggaaatggaatgctatctttggcatgactgggagaaatacatactacctgtcacacagaatgt

SEQ ID NO: 278 - DNA, 509 bp, Homo sapien
cgtgtgggaggccggaagttgcggcttcattactcgccatttcaaaatgctgccgaggccctaggatctgtgactgccacccctccccccacccgggctcggcgggggagcgactcatggagctgccgtaagttttaccaacagactgcagtttcttcactaccaaaatgacatcattttccacctctgctcagtgttcaacatctgacagtgcttgcaggatctctcctggacaaatcaatcaggtacgaccaaaactgccgcttttgaagattttgcatgcagcaggtgcgcaaggtgaaatgttcactgttaaagaggtcatgcactatttaggtcagtacataatggtgaagcaactttatgatcagcaggagcagcatatggtatattgtggtggagatcttttgggagaactactgggacgtcagagcttctccgtgaaagacccaagccctctctatgatcgctttctacactgtattacataaataaattaaataaaataa

SEQ ID NO: 279 - DNA, 617 bp, Homo sapien
gggactacaagcgtgcctcaccacacctggctaagttttgtatgttatgtagagacaggttttgccatgttgcccaggctggtatcaaactcctgggttcaagcaatttgcctgccttggcctcccaaagtgctgggattacaggtgtgaaccacttcagccgactaaatttttatttgataaacacttggattttatgttttgtccacttacaatgctgatggctcttattaaacattgtacttcatttgccaaaaagaattattatgtgaacacatatcaaaagcctaaagtcgtttatgtgccctggactgggaaaatatttttataatccaggcaaattacttctagtaatagaatagacttctttatttggacgtctgagaaaatttttaagaggatactaggtaaattcactgctttttctcattgtcagatcagttcatttctgtgctgaaaagtctgggtctgttaattgtcagaaagacaatgagtagatggacctagtagttgggagcggctttcctgttgtaggaccccttacacaaactttgacagtcttgtaaatatgttatttctttctttagcaaactaacttaccttacctcctctaatga

SEQ ID NO: 280 - DNA, 359 bp, Homo sapien
attaaacatcaatttcagggcttcattgaaaccactgatccatgaccctcaggttctgttctttggcaggatgccaaagaagagtgaatggcccacaaagagcctggtagcacatacgcttttcaaaaggtcatgcacttacagctaaagccattaaggtgagtgaaacatctggctagttgtcctgagcttgggtaggggcaggattaccatatagttggtgcagattgctgtgaactgtataactcttggggcactgttcataggctgccatataaatgatcctttagagatgtgtaatatatatctgaggaggccttgggggtggggtggggtgataatggacataccatcgtaac

SEQ ID NO: 281 - DNA, 4973 bp, Homo sapien
tatttttgcttgtaactgttttaacctaagtaaggtagtaaggctttggaaatataaatgacagtaataggattgctttattaaagaattgctcctggcctgtgcggtggctcatgcctgtaatcccagcactttgggaggccaaggcgggtggatcacaaagtcaggagtttgagaccagcctggccaagatgataaaatcctgtctctactaaaaatacaaaaattagtcaggcgtgcgcctataatcctagctacttgggaggctgaggcaggagaatcacttgagccagggaggtggaggttttagtgagccgagattgcgccactgctctccagccagggtgacagagcaagactccgtctcaaacaaacaaaaaaattgctccatctgcattatatgttagtccaacttcgctttgaagaccactgtggtcagaaaatgctgtctctcaaactttttgttgtctccgtctgtccacaaaaatgtttctggaaataatgttttttataattagaattttgaaaatgtttgcttttttcaatagaaccgcattgacagatcagttgtaggatctgtatccttcctctagcagcctttatcagatggtgatgatattttccatattttatctctgaacctggtagtggttggtgaacctgacccacagtagacttattttgggtctatctcattcacatagcctcaaataatgaatagtccagattattaaattgtttgcagcttgatcttttcgtgtagccaagtttttgtcttttgttctacttgaaaaatttctttgtaagtccttggaatgcatttctcttttagattaatgtaatatctaagaatttctctgtactgtgttgttttccttggttctttttattggccttgagaaaaactttatttgctgctgcttcttaggaaatgtttatagtaactgggaaaaataagacaatgaaaaaattaatttatatacaggtgatggtaatgggaatttaaaccataaaattatccttgacacttagaatgtcgctttagatgaagatgctattgttttatgaagcaaacggggaaaaatccagatttcaagatcccataaccctgtatgacttaacacttgaaagttgaaattaaatgtaaaaagccatacactcttttccttttgtttgtgagttaggcgaatttggtaatatataggaagagatgacaaaaatagactccattatgtcctgcttggaaccagttttcatataaaaatttaaaagcttgatatggaagaacatttttagctatttttcactgttttttttcccgattatattttggtaatatattttggatatggcctgtcttggtctttgtcatttttatcaattttgatttttcccttgcaaatgagagctttgtccagccaacatggagaagtacatttctagggactaaacctggctcccgggttgtttgctgaggtcctttttgtgtggaaagaatggttattaccagggaaggttttccttttgttttacttgctatccagatgctgctcagactctcgctctcgcacaggatcacagtatggatattccaagtcaagaccaactgaagcaaagtgcagaggaaagttccacttccagaaaaagaactacagaagacgatatccccacactgcctacctcagagcataaatgcatacattctagagaagatgaagacttaattgaaaatttagcccaagatgaaacatctaggctggaccttggatttgaggagtgggatgtagctggcctgccttggtggtttttaggaaacttgagaagcaactatacacctagaagtaatggctcaactgatttacagacaaatcaggatgtgggtactgccattgtttcagatactacagatgacttgtggtttttgaatgagtcagtatcagagcagttaggtgttggaataaaagttgaagctgctgatactgaacaaacaagtgaagaagtagggaaagtaagtgacaaaaaggtgattgaagtgggaaaaaatgatgacctggaggactctaagtccttaagtgatgataccgatgtagaggttacctctgaggatgagtggcagtgtactgaatgcaagaaatttaactctccaagcaagaggtactgttttcgttgttgggccttgaggaaggattggtattcagattgttcaaagttaacccattctctctccacgtctgatatcactgccatacctgaaaaggaaaatgaaggaaatgatgtccctgattgtcgaagaaccatttcggctcctgtcgttagacctaaagatgcgtatataaagaaagaaaactccaaactttttgatccctgcaactcagtggaattcttggatttggctcacagttctgaaagccaagagaccatctcaagcatgggagaacagttagataacctttctgaacagagaacagatacagaaaacatggaggattgccagaatctcttgaagccatgtagcttatgtgagaaaagaccacgagacgggaacattattcatggaaggacgggccatcttgtcacttgttttcactgtgccagaagactaaagaaggctggggcttcatgccctatttgcaagaaagagattcagctggttattaaggtttttatagcataatggtagtacgaacataaaaatgcatttattcagttcacttaccacattatttgaaaatcaatcctttatttaattttatttccaacctgtcagagaatgttcttaggcatcaaaatccaaggtagctgtaagaaaaatactggagctaacaatgaagaacagaagtaatctgattagtcaaattattaagtgccatggattactttatgcagcagtcaggtacatagttaggtgaacccaaaagaaaaactcttgaaaacaagagatttcttccatgcacatttacaatattgaggtataattaacatgataaagtgtttccttctaacgagttgtagaaatctgagtaaccacccaaaaaagcaatagaatgtttgtgtcaccccaaaacactcccttctgcccctcttcagacagtccttcagctatttcatggctctcaccctagtttttttttttttttgcacttttttttttccgggggtataggggaggtgtggggcgacagggtctgtcttgttctgtctcccaggctgaagtgcagtgcagtggtatgatcatggctcactgcagccttggtttcctgggcataagtggtcttcccacttcagcctcctgagtagctgagactatagactagcataaccacactggctaattttttgtggagatgaagtctcactatgttgcccaggctggtctcgaactcctgggctcaaacaatcctcccgcctcagccttccaaattgctgggattatagtcatgaggcacctagtctggcccttttgcaagactttaatctgaaatctaaatttttaaaatttaagtacttacaaaggatatactatccaacatattgcatattatatatgtgctttaaagttttttttttttttgagagacggtctcgctttgtcatccaagctggagtgcagtggtgcaaacacggcccacctcctgggctcaagtgatcctccagcctcagcttccctcacaggcattcactatcactcccagctaattaaaataatttgtagacggtgtctcgttatgttgcccaggctggtctcgaactcctgggtttaagtgattcccccgcctcagcctcccaaagtgttgggcttacagccttgagccactatgcttggctcaaagatatttttatgaaagccctgggactatagatttagctgattaaatttatagaaaaagtcctgtcatataaactggcaaagtctgttcttaatttaattagccaaatcagacttaacttccgtcagaacatgtcttggttttaattcagataaacacacaaacatacttctctggcacagccttcagaagcatcagtttttgttttgttttgttttgttttttgagacagggtcttgctctgttgcccaggctggagtgcactggcacaatcacagttcactgcagcctcgacctcccagatccaagcaatcctcccacctaagcctcccaagtagctgggtctataggcgcgtgccaccaccatgcccagctgaattttgtattttttgtacagacagcattttgccatgttgcccaggctggtcccaaacttctagcctcaagcaaccctcctgcctcagcctctcaaagtgctaggattgcagtcctgagctactgccccctaccctctttgcgtcttaggagtcatttagattttttttgatccttttgtttagtgcctctggagctgcttacaccaaggcaatacgccttgatatactggatggttgagaggcagcctcttttttttttttttttttttttggaggatagggagtatggctgttgtgaaaagggaggtaaagagaaatggtagatctgaagaggcctcatcagagcacatattttaggacaacacatatggaaattggacatctttaagttggtttccatagagctatgcatgtatccttacccccatgggaaaatgttggtgtgttctcaagggtatgcatgtgtcattttgaagaccaaggccctagaattgtcaaacttaaggatcataaaaatcatgagggttgcttgttaaaaatgtccaaacgtgcagagactgatctttgagatctggaccaggaatttgcatttgaacaagtgttcctggaatctctatgcaagttttatacagaacatacttttggaatccttgccctagacaggggtgtccaatcttttggcttccctggtccacaatggaagaagaattgtcttggaccacacataaaatacactaacactaacaatagctgatgagctaaaaaaaaa

SEQ ID NO: 282 - DNA, 3795 bp, Homo sapien
gatattgctttattagattttaataggcgtgttgcagttaagttcatgtcaggccatttcctaaagcttccccaaacctggggaaactttatagtcatcttggtacgtggcgagggtttcatatgttttctgaattatgcctaattttgtagtagactggagggtttatacagatagcctgtttttaacagtagattttggcctttgtgcagaggttttttttccccccaggtttgggattcttctagctttgctcacagtgggttgaggagaggtgttgcctttatttgatgactgttgtgaacttgagttctctttcttgtgtgtaacccattgtgttgcacactaactggtgagccagaatggaactgctacatcccctggtctcagttatttctactgcactgatggacacctttcccttctttcagcaacaaagtgcagaggaaagttccacttccagaaaaagaactacagaagacgatatccccacactgcctacctcagagcataaatgcatacattctagagaagatgaagacttaattgaaaatttagcccaagatgaaacatctaggctggaccttggatttgaggagtgggatgtagctggcctgccttggtggtttttaggaaacttgagaagcaactatacacctagaagtaatggctcaactgatttacagacaaatcaggatgtgggtactgccattgtttcagatactacagatgacttgtggtttttgaatgagtcagtatcagagcagttaggtgttggaataaaagttgaagctgctgatactgaacaaacaagtgaagaagtagggaaagtaagtgacaaaaaggtgattgaagtgggaaaaaatgatgacctggaggactctaagtccttaagtgatgataccgatgtagaggttacctctgaggatgagtggcagtgtactgaatgcaagaaatttaactctccaagcaagaggtactgttttcgttgttgggccttgaggaaggattggtattcagattgttcaaagttaacccattctctctccacgtctgatatcactgccatacctgaaaaggaaaatgaaggaaatgatgtccctgattgtcgaagaaccatttcggctcctgtcgttagacctaaagatgcgtatataaagaaagaaaactccaaactttttgatccctgcaactcagtggaattcttggatttggctcacagttctgaaagccaagagaccatctcaagcatgggagaacagttagataacctttctgaacagagaacagatacagaaaacatggaggattgccagaatctcttgaagccatgtagcttatgtgagaaaagaccacgagacgggaacattattcatggaaggacgggccatcttgtcacttgttttcactgtgccagaagactaaagaaggctggggcttcatgccctatttgcaagaaagagattcagctggttattaaggtttttatagcataatggtagtacgaacataaaaatgcatttattcagttcacttaccacattatttgaaaatcaatcctttatttaattttatttccaacctgtcagagaatgttcttaggcatcaaaatccaaggtagctgtaagaaaaatactggagctaacaatgaagaacagaagtaatctgattagtcaaattattaagtgccatggattactttatgcagcagtcaggtacatagttaggtgaacccaaaagaaaaactcttgaaaacaagagatttcttccatgcacatttacaatattgaggtataattaacatgataaagtgtttccttctaacgagttgtagaaatctgagtaaccacccaaaaaagcaatagaatgtttgtgtcaccccaaaacactcccttctgcccctcttcagacagtccttcagctatttcatggctctcaccctagtttttttttttttttgcacttttttttttccgggggtataggggaggtgtggggcgacagggtctgtcttgttctgtctcccaggctgaagtgcagtgcagtggtatgatcatggctcactgcagccttggtttcctgggcataagtggtcttcccacttcagcctcctgagtagctgagactatagactagcataaccacactggctaattttttgtggagatgaagtctcactatgttgcccaggctggtctcgaactcctgggctcaaacaatcctcccgcctcagccttccaaattgctgggattatagtcatgaggcacctagtctggcccttttgcaagactttaatctgaaatctaaatttttaaaatttaagtacttacaaaggatatactatccaacatattgcatattatatatgtgctttaaagttttttttttttttgagagacggtctcgctttgtcatccaagctggagtgcagtggtgcaaacacggcccacctcctgggctcaagtgatcctccagcctcagcttccctcacaggcattcactatcactcccagctaattaaaataatttgtagacggtgtctcgttatgttgcccaggctggtctcgaactcctgggtttaagtgattcccccgcctcagcctcccaaagtgttgggcttacagccttgagccactatgcttggctcaaagatatttttatgaaagccctgggactatagatttagctgattaaatttatagaaaaagtcctgtcatataaactggcaaagtctgttcttaatttaattagccaaatcagacttaacttccgtcagaacatgtcttggttttaattcagataaacacacaaacatacttctctggcacagccttcagaagcatcagtttttgttttgttttgttttgttttttgagacagggtcttgctctgttgcccaggctggagtgcactggcacaatcacagttcactgcagcctcgacctcccagatccaagcaatcctcccacctaagcctcccaagtagctgggtctataggcgcgtgccaccaccatgcccagctgaattttgtattttttgtacagacagcattttgccatgttgcccaggctggtcccaaacttctagcctcaagcaaccctcctgcctcagcctctcaaagtgctaggattgcagtcctgagctactgccccctaccctctttgcgtcttaggagtcatttagattttttttgatccttttgtttagtgcctctggagctgcttacaccaaggcaatacgccttgatatactggatggttgagaggcagcctcttttttttttttttttttttttggaggatagggagtatggctgttgtgaaaagggaggtaaagagaaatggtagatctgaagaggcctcatcagagcacatattttaggacaacacatatggaaattggacatctttaagttggtttccatagagctatgcatgtatccttacccccatgggaaaatgttggtgtgttctcaagggtatgcatgtgtcattttgaagaccaaggccctagaattgtcaaacttaaggatcataaaaatcatgagggttgcttgttaaaaatgtccaaacgtgcagagactgatctttgagatctggaccaggaatttgcatttgaacaagtgttcctggaatctctatgcaagttttatacagaacatacttttggaatccttgccctagacaggggtgtccaatcttttggcttccctggtccacaatggaagaagaattgtcttggaccacacataaaatacactaacactaacaatagctgatgagctaaaaaaaaa

SEQ ID NO: 283 - DNA, 3643 bp, Homo sapien
actgtgctagctgggaaggatataaagattttataccatagttggcatattgtttgtgcttcctggatcctgccctcaaatagttcagaccaaaagaatgtaaacccagttatagaatgaggtaaaaatttaatcatcaatatatgtacaggattaagaagtactatagaggtgatttattctgtcagggtcagcttaacaaagaagttgtcatctgacttgatgtataaaaaatgggtcattgattagggatagaaaatgggatgaggaaggaaaaatggggagtgattccttaatggttacagagtgttgggcgataacatcacgtatgatatccccacactgcctacctcagagcataaatgcatacattctagagaagatgaagacttaattgaaaatttagcccaagatgaaacatctaggctggaccttggatttgaggagtgggatgtagctggcctgccttggtggtttttaggaaacttgagaagcaactatacacctagaagtaatggctcaactgatttacagacaaatcaggatgtgggtactgccattgtttcagatactacagatgacttgtggtttttgaatgagtcagtatcagagcagttaggtgttggaataaaagttgaagctgctgatactgaacaaacaagtgaagaagtagggaaagtaagtgacaaaaaggtgattgaagtgggaaaaaatgatgacctggaggactctaagtccttaagtgatgataccgatgtagaggttacctctgaggatgagtggcagtgtactgaatgcaagaaatttaactctccaagcaagaggtactgttttcgttgttgggccttgaggaaggattggtattcagattgttcaaagttaacccattctctctccacgtctgatatcactgccatacctgaaaaggaaaatgaaggaaatgatgtccctgattgtcgaagaaccatttcggctcctgtcgttagacctaaagatgcgtatataaagaaagaaaactccaaactttttgatccctgcaactcagtggaattcttggatttggctcacagttctgaaagccaagagaccatctcaagcatgggagaacagttagataacctttctgaacagagaacagatacagaaaacatggaggattgccagaatctcttgaagccatgtagcttatgtgagaaaagaccacgagacgggaacattattcatggaaggacgggccatcttgtcacttgttttcactgtgccagaagactaaagaaggctggggcttcatgccctatttgcaagaaagagattcagctggttattaaggtttttatagcataatggtagtacgaacataaaaatgcatttattcagttcacttaccacattatttgaaaatcaatcctttatttaattttatttccaacctgtcagagaatgttcttaggcatcaaaatccaaggtagctgtaagaaaaatactggagctaacaatgaagaacagaagtaatctgattagtcaaattattaagtgccatggattactttatgcagcagtcaggtacatagttaggtgaacccaaaagaaaaactcttgaaaacaagagatttcttccatgcacatttacaatattgaggtataattaacatgataaagtgtttccttctaacgagttgtagaaatctgagtaaccacccaaaaaagcaatagaatgtttgtgtcaccccaaaacactcccttctgcccctcttcagacagtccttcagctatttcatggctctcaccctagtttttttttttttttgcacttttttttttccgggggtataggggaggtgtggggcgacagggtctgtcttgttctgtctcccaggctgaagtgcagtgcagtggtatgatcatggctcactgcagccttggtttcctgggcataagtggtcttcccacttcagcctcctgagtagctgagactatagactagcataaccacactggctaattttttgtggagatgaagtctcactatgttgcccaggctggtctcgaactcctgggctcaaacaatcctcccgcctcagccttccaaattgctgggattatagtcatgaggcacctagtctggcccttttgcaagactttaatctgaaatctaaatttttaaaatttaagtacttacaaaggatatactatccaacatattgcatattatatatgtgctttaaagttttttttttttttgagagacggtctcgctttgtcatccaagctggagtgcagtggtgcaaacacggcccacctcctgggctcaagtgatcctccagcctcagcttccctcacaggcattcactatcactcccagctaattaaaataatttgtagacggtgtctcgttatgttgcccaggctggtctcgaactcctgggtttaagtgattcccccgcctcagcctcccaaagtgttgggcttacagccttgagccactatgcttggctcaaagatatttttatgaaagccctgggactatagatttagctgattaaatttatagaaaaagtcctgtcatataaactggcaaagtctgttcttaatttaattagccaaatcagacttaacttccgtcagaacatgtcttggttttaattcagataaacacacaaacatacttctctggcacagccttcagaagcatcagtttttgttttgttttgttttgttttttgagacagggtcttgctctgttgcccaggctggagtgcactggcacaatcacagttcactgcagcctcgacctcccagatccaagcaatcctcccacctaagcctcccaagtagctgggtctataggcgcgtgccaccaccatgcccagctgaattttgtattttttgtacagacagcattttgccatgttgcccaggctggtcccaaacttctagcctcaagcaaccctcctgcctcagcctctcaaagtgctaggattgcagtcctgagctactgccccctaccctctttgcgtcttaggagtcatttagattttttttgatccttttgtttagtgcctctggagctgcttacaccaaggcaatacgccttgatatactggatggttgagaggcagcctcttttttttttttttttttttttggaggatagggagtatggctgttgtgaaaagggaggtaaagagaaatggtagatctgaagaggcctcatcagagcacatattttaggacaacacatatggaaattggacatctttaagttggtttccatagagctatgcatgtatccttacccccatgggaaaatgttggtgtgttctcaagggtatgcatgtgtcattttgaagaccaaggccctagaattgtcaaacttaaggatcataaaaatcatgagggttgcttgttaaaaatgtccaaacgtgcagagactgatctttgagatctggaccaggaatttgcatttgaacaagtgttcctggaatctctatgcaagttttatacagaacatacttttggaatccttgccctagacaggggtgtccaatcttttggcttccctggtccacaatggaagaagaattgtcttggaccacacataaaatacactaacactaacaatagctgatgagctaaaaaaaaa

SEQ ID NO: 284 - DNA, 3575 bp, Homo sapien
gatattgctttattagattttaataggcgtgttgcagttaagttcatgtcaggccatttcctaaagcttccccaaacctggggaaactttatagtcatcttggtacgtggcgagggtttcatatgttttctgaattatgcctaattttgtagtagactggagggtttatacagatagcctgtttttaacagtagattttggcctttgtgcagagcaaagtgcagaggaaagttccacttccagaaaaagaactacagaagacgatatccccacactgcctacctcagagcataaatgcatacattctagagaagatgaagacttaattgaaaatttagcccaagatgaaacatctaggctggaccttggatttgaggagtgggatgtagctggcctgccttggtggtttttaggaaacttgagaagcaactatacacctagaagtaatggctcaactgatttacagacaaatcaggatgtgggtactgccattgtttcagatactacagatgacttgtggtttttgaatgagtcagtatcagagcagttaggtgttggaataaaagttgaagctgctgatactgaacaaacaagtgaagaagtagggaaagtaagtgacaaaaaggtgattgaagtgggaaaaaatgatgacctggaggactctaagtccttaagtgatgataccgatgtagaggttacctctgaggatgagtggcagtgtactgaatgcaagaaatttaactctccaagcaagaggtactgttttcgttgttgggccttgaggaaggattggtattcagattgttcaaagttaacccattctctctccacgtctgatatcactgccatacctgaaaaggaaaatgaaggaaatgatgtccctgattgtcgaagaaccatttcggctcctgtcgttagacctaaagatgcgtatataaagaaagaaaactccaaactttttgatccctgcaactcagtggaattcttggatttggctcacagttctgaaagccaagagaccatctcaagcatgggagaacagttagataacctttctgaacagagaacagatacagaaaacatggaggattgccagaatctcttgaagccatgtagcttatgtgagaaaagaccacgagacgggaacattattcatggaaggacgggccatcttgtcacttgttttcactgtgccagaagactaaagaaggctggggcttcatgccctatttgcaagaaagagattcagctggttattaaggtttttatagcataatggtagtacgaacataaaaatgcatttattcagttcacttaccacattatttgaaaatcaatcctttatttaattttatttccaacctgtcagagaatgttcttaggcatcaaaatccaaggtagctgtaagaaaaatactggagctaacaatgaagaacagaagtaatctgattagtcaaattattaagtgccatggattactttatgcagcagtcaggtacatagttaggtgaacccaaaagaaaaactcttgaaaacaagagatttcttccatgcacatttacaatattgaggtataattaacatgataaagtgtttccttctaacgagttgtagaaatctgagtaaccacccaaaaaagcaatagaatgtttgtgtcaccccaaaacactcccttctgcccctcttcagacagtccttcagctatttcatggctctcaccctagtttttttttttttttgcacttttttttttccgggggtataggggaggtgtggggcgacagggtctgtcttgttctgtctcccaggctgaagtgcagtgcagtggtatgatcatggctcactgcagccttggtttcctgggcataagtggtcttcccacttcagcctcctgagtagctgagactatagactagcataaccacactggctaattttttgtggagatgaagtctcactatgttgcccaggctggtctcgaactcctgggctcaaacaatcctcccgcctcagccttccaaattgctgggattatagtcatgaggcacctagtctggcccttttgcaagactttaatctgaaatctaaatttttaaaatttaagtacttacaaaggatatactatccaacatattgcatattatatatgtgctttaaagttttttttttttttgagagacggtctcgctttgtcatccaagctggagtgcagtggtgcaaacacggcccacctcctgggctcaagtgatcctccagcctcagcttccctcacaggcattcactatcactcccagctaattaaaataatttgtagacggtgtctcgttatgttgcccaggctggtctcgaactcctgggtttaagtgattcccccgcctcagcctcccaaagtgttgggcttacagccttgagccactatgcttggctcaaagatatttttatgaaagccctgggactatagatttagctgattaaatttatagaaaaagtcctgtcatataaactggcaaagtctgttcttaatttaattagccaaatcagacttaacttccgtcagaacatgtcttggttttaattcagataaacacacaaacatacttctctggcacagccttcagaagcatcagtttttgttttgttttgttttgttttttgagacagggtcttgctctgttgcccaggctggagtgcactggcacaatcacagttcactgcagcctcgacctcccagatccaagcaatcctcccacctaagcctcccaagtagctgggtctataggcgcgtgccaccaccatgcccagctgaattttgtattttttgtacagacagcattttgccatgttgcccaggctggtcccaaacttctagcctcaagcaaccctcctgcctcagcctctcaaagtgctaggattgcagtcctgagctactgccccctaccctctttgcgtcttaggagtcatttagattttttttgatccttttgtttagtgcctctggagctgcttacaccaaggcaatacgccttgatatactggatggttgagaggcagcctcttttttttttttttttttttttggaggatagggagtatggctgttgtgaaaagggaggtaaagagaaatggtagatctgaagaggcctcatcagagcacatattttaggacaacacatatggaaattggacatctttaagttggtttccatagagctatgcatgtatccttacccccatgggaaaatgttggtgtgttctcaagggtatgcatgtgtcattttgaagaccaaggccctagaattgtcaaacttaaggatcataaaaatcatgagggttgcttgttaaaaatgtccaaacgtgcagagactgatctttgagatctggaccaggaatttgcatttgaacaagtgttcctggaatctctatgcaagttttatacagaacatacttttggaatccttgccctagacaggggtgtccaatcttttggcttccctggtccacaatggaagaagaattgtcttggaccacacataaaatacactaacactaacaatagctgatgagctaaaaaaaaa

SEQ ID NO: 285 - DNA, 3210 bp, Homo sapien
gactctagcgatcccttaaatagttgagcattacttctaggtgtaagttgcttctcaagtttcctaaaaaccaccaaggcaggccagctgcatcccactcctcaaatcaggatgtgggtactgccattgtttcagatactacagatgacttgtggtttttgaatgagtcagtatcagagcagttaggtgttggaataaaagttgaagctgctgatactgaacaaacaagtgaagaagtagggaaagtaagtgacaaaaaggtgattgaagtgggaaaaaatgatgacctggaggactctaagtccttaagtgatgataccgatgtagaggttacctctgaggatgagtggcagtgtactgaatgcaagaaatttaactctccaagcaagaggtactgttttcgttgttgggccttgaggaaggattggtattcagattgttcaaagttaacccattctctctccacgtctgatatcactgccatacctgaaaaggaaaatgaaggaaatgatgtccctgattgtcgaagaaccatttcggctcctgtcgttagacctaaagatgcgtatataaagaaagaaaactccaaactttttgatccctgcaactcagtggaattcttggatttggctcacagttctgaaagccaagagaccatctcaagcatgggagaacagttagataacctttctgaacagagaacagatacagaaaacatggaggattgccagaatctcttgaagccatgtagcttatgtgagaaaagaccacgagacgggaacattattcatggaaggacgggccatcttgtcacttgttttcactgtgccagaagactaaagaaggctggggcttcatgccctatttgcaagaaagagattcagctggttattaaggtttttatagcataatggtagtacgaacataaaaatgcatttattcagttcacttaccacattatttgaaaatcaatcctttatttaattttatttccaacctgtcagagaatgttcttaggcatcaaaatccaaggtagctgtaagaaaaatactggagctaacaatgaagaacagaagtaatctgattagtcaaattattaagtgccatggattactttatgcagcagtcaggtacatagttaggtgaacccaaaagaaaaactcttgaaaacaagagatttcttccatgcacatttacaatattgaggtataattaacatgataaagtgtttccttctaacgagttgtagaaatctgagtaaccacccaaaaaagcaatagaatgtttgtgtcaccccaaaacactcccttctgcccctcttcagacagtccttcagctatttcatggctctcaccctagtttttttttttttttgcacttttttttttccgggggtataggggaggtgtggggcgacagggtctgtcttgttctgtctcccaggctgaagtgcagtgcagtggtatgatcatggctcactgcagccttggtttcctgggcataagtggtcttcccacttcagcctcctgagtagctgagactatagactagcataaccacactggctaattttttgtggagatgaagtctcactatgttgcccaggctggtctcgaactcctgggctcaaacaatcctcccgcctcagccttccaaattgctgggattatagtcatgaggcacctagtctggcccttttgcaagactttaatctgaaatctaaatttttaaaatttaagtacttacaaaggatatactatccaacatattgcatattatatatgtgctttaaagttttttttttttttgagagacggtctcgctttgtcatccaagctggagtgcagtggtgcaaacacggcccacctcctgggctcaagtgatcctccagcctcagcttccctcacaggcattcactatcactcccagctaattaaaataatttgtagacggtgtctcgttatgttgcccaggctggtctcgaactcctgggtttaagtgattcccccgcctcagcctcccaaagtgttgggcttacagccttgagccactatgcttggctcaaagatatttttatgaaagccctgggactatagatttagctgattaaatttatagaaaaagtcctgtcatataaactggcaaagtctgttcttaatttaattagccaaatcagacttaacttccgtcagaacatgtcttggttttaattcagataaacacacaaacatacttctctggcacagccttcagaagcatcagtttttgttttgttttgttttgttttttgagacagggtcttgctctgttgcccaggctggagtgcactggcacaatcacagttcactgcagcctcgacctcccagatccaagcaatcctcccacctaagcctcccaagtagctgggtctataggcgcgtgccaccaccatgcccagctgaattttgtattttttgtacagacagcattttgccatgttgcccaggctggtcccaaacttctagcctcaagcaaccctcctgcctcagcctctcaaagtgctaggattgcagtcctgagctactgccccctaccctctttgcgtcttaggagtcatttagattttttttgatccttttgtttagtgcctctggagctgcttacaccaaggcaatacgccttgatatactggatggttgagaggcagcctcttttttttttttttttttttttggaggatagggagtatggctgttgtgaaaagggaggtaaagagaaatggtagatctgaagaggcctcatcagagcacatattttaggacaacacatatggaaattggacatctttaagttggtttccatagagctatgcatgtatccttacccccatgggaaaatgttggtgtgttctcaagggtatgcatgtgtcattttgaagaccaaggccctagaattgtcaaacttaaggatcataaaaatcatgagggttgcttgttaaaaatgtccaaacgtgcagagactgatctttgagatctggaccaggaatttgcatttgaacaagtgttcctggaatctctatgcaagttttatacagaacatacttttggaatccttgccctagacaggggtgtccaatcttttggcttccctggtccacaatggaagaagaattgtcttggaccacacataaaatacactaacactaacaatagctgatgagctaaaaaaaaa

SEQ ID NO: 286 - DNA, 1410 bp, Homo sapien
cgtgtgggaggccggaagttgcggcttcattactcgccatttcaaaatgctgccgaggccctaggatctgtgactgccacccctccccccacccgggctcggcgggggagcgactcatggagctgccgtaagttttaccaacagactgcagtttcttcactaccaaaatgacatcattttccacctctgctcagtgttcaacatctgacagtgcttgcaggatctctcctggacaaatcaatcaggtacgaccaaaactgccgcttttgaagattttgcatgcagcaggtgcgcaaggtgaaatgttcactgttaaagaggtcatgcactatttaggtcagtacataatggtgaagcaactttatgatcagcaggagcagcatatggtatattgtggtggagatcttttgggagaactactgggacgtcagagcttctccgtgaaagacccaagccctctctatgatatgctaagaaagaatcttgtcactttagccactgctactacagatgctgctcagactctcgctctcgcacaggatcacagtatggatattccaagtcaagaccaactgaagcaaagtgcagaggaaagttccacttccagaaaaagaactacagaagacgatatccccacactgcctacctcagagcataaatgcatacattctagagaagatgaagacttaattgaaaatttagcccaagatgaaacatctaggctggaccttggatttgaggagtgggatgtagctggcctgccttggtggtttttaggaaacttgagaagcaactatacacctagaagtaatggctcaactgatttacagacaaatcaggatgtgggtactgccattgtttcagatactacagatgacttgtggtttttgaatgagtcagtatcagagcagttaggtgttggaataaaagttgaagctgctgatactgaacaaacaagtgaagaagtagggaaagtaagtgacaaaaaggtgattgaagtgggaaaaaatgatgacctggaggactctaagtccttaagtgatgataccgatgtagaggttacctctgaggatgagtggcagtgtactgaatgcaagaaatttaactctccaagcaagaggatgccaaagaagagtgaatggcccacaaagagcctggtagcacatacgcttttcaaaaggtcatgcacttacagctaaagccattaaggtgagtgaaacatctggctagttgtcctgagcttgggtaggggcaggattaccatatagttggtgcagattgctgtgaactgtataactcttggggcactgttcataggctgccatataaatgatcctttagagatgtgtaatatatatctgaggaggccttgggggtggggtggggtgataatggacataccatcgtaac

SEQ ID NO: 287 - DNA, 1865 bp, Homo sapien
tatttttgcttgtaactgttttaacctaagtaaggtagtaaggctttggaaatataaatgacagtaataggattgctttattaaagaattgctcctggcctgtgcggtggctcatgcctgtaatcccagcactttgggaggccaaggcgggtggatcacaaagtcaggagtttgagaccagcctggccaagatgataaaatcctgtctctactaaaaatacaaaaattagtcaggcgtgcgcctataatcctagctacttgggaggctgaggcaggagaatcacttgagccagggaggtggaggttttagtgagccgagattgcgccactgctctccagccagggtgacagagcaagactccgtctcaaacaaacaaaaaaattgctccatctgcattatatgttagtccaacttcgctttgaagaccactgtggtcagaaaatgctgtctctcaaactttttgttgtctccgtctgtccacaaaaatgtttctggaaataatgttttttataattagaattttgaaaatgtttgcttttttcaatagaaccgcattgacagatcagttgtaggatctgtatccttcctctagcagcctttatcagatggtgatgatattttccatattttatctctgaacctggtagtggttggtgaacctgacccacagtagacttattttgggtctatctcattcacatagcctcaaataatgaatagtccagattattaaattgtttgcagcttgatcttttcgtgtagccaagtttttgtcttttgttctacttgaaaaatttctttgtaagtccttggaatgcatttctcttttagattaatgtaatatctaagaatttctctgtactgtgttgttttccttggttctttttattggccttgagaaaaactttatttgctgctgcttcttaggaaatgtttatagtaactgggaaaaataagacaatgaaaaaattaatttatatacaggtgatggtaatgggaatttaaaccataaaattatccttgacacttagaatgtcgctttagatgaagatgctattgttttatgaagcaaacggggaaaaatccagatttcaagatcccataaccctgtatgacttaacacttgaaagttgaaattaaatgtaaaaagccatacactcttttccttttgtttgtgagttaggcgaatttggtaatatataggaagagatgacaaaaatagactccattatgtcctgcttggaaccagttttcatataaaaatttaaaagcttgatatggaagaacatttttagctatttttcactgttttttttcccgattatattttggtaatatattttggatatggcctgtcttggtctttgtcatttttatcaattttgatttttcccttgcaaatgagagctttgtccagccaacatggagaagtacatttctagggactaaacctggctcccgggttgtttgctgaggtcctttttgtgtggaaagaatggttattaccagggaaggttttccttttgttttacttgctatccagatgctgctcagactctcgctctcgcacaggatcacagtatggatattccaagtcaagaccaactgaaggtaaaatcaccacacggtgacttcttttgttgtacagagtggccccttctctgtacctatggatcttggactcccaagacctttccctgaatgtggtaagaatttaataagaaaggttcttgggagttcacagaccagggacagagtgaaccttctctgttctgcccataacagagttccagtctctgaacctttctttgggatgtagcacttctgatcttcagttcttccagttgcatttttctttgggttt

SEQ ID NO: 288 - DNA, 1031 bp, Homo sapien
cgtgtgggaggccggaagttgcggcttcattactcgccatttcaaaatgctgccgaggccctaggatctgtgactgccacccctccccccacccgggctcggcgggggagcgactcatggagctgccgtaagttttaccaacagactgcagtttcttcactaccaaaatgacatcattttccacctctgctcagtgttcaacatctgacagtgcttgcaggatctctcctggacaaatcaatcaggtacgaccaaaactgccgcttttgaagattttgcatgcagcaggtgcgcaaggtgaaatgttcactgttaaagaggtcatgcactatttaggtcagtacataatggtgaagcaactttatgatcagcaggagcagcatatggtatattgtggtggagatcttttgggagaactactgggacgtcagagcttctccgtgaaagacccaagccctctctatgatatgctaagaaagaatcttgtcactttagccactgctactacagaaatgggtcatttgttctgtagaatttcccacgctctagagttggcagattgtatccttgtgattttgtttaatgtgtttctttaccctctctatttttggtaaactggtagtgcttgaataaattcaagtttaaattttttgccaagaaagctttataggtaatgctttgtacttctgtttaatcacatcagagtcatgtaaggtctgcctgtctattttagtcagtcatgttaataatctgtgggctcaggtggtatcagtctgatccatctgttacacaggtcactcaagaaccttttacctaatggctttagccatctcttatctgaatgccaatttgtctaaccctttgcttgattctagaccttctaaatactgctctttaactattaggtatgtataggaaactggctgtactggagtctggagtctccaaaatggtggtctgtaagagataggtaaataaactggacagactgaacatagccatttccaaataatgaaactttttccctctcc

SEQ ID NO: 289 - DNA, 218 bp, Homo sapien
tcaaagatttttttatgaaagcccgtgggactatagattatagctgattaattttatagaaaaagtccgtgtcatataaacgggcaaagtcggtccttaatttaattagccaaatcagatttaacttccgtcagaacagtgtctgggttttaatccagataaacacacaaactatatcttctcgggcacagccttcagaaagcatcagttttggtgtg

SEQ ID NO: 290 - DNA, 492 bp, Homo sapien
  misc_feature (257)..(257): n=a, c, g or t
  misc_feature (273)..(273): n=a, c, g or t
  misc_feature (278)..(278): n=a, c, g or t
  misc_feature (281)..(281): n=a, c, g or t
caaaagaagcatttatgagttcctgctgtgtgccaggctctggcctaggcactgggaacagtgaacagaacagactcgactcagagctcaaggacttttagtccagttgaggagatcaatcatataattgatcaaataatcacagatttgtggtcgtaagtgtcctggggaaaactcaagcggaagggaagatgggagggtcaggtatatgtctgcgggtggagagtctgcagtttcctagagagctggacagggangccccgccgaagaggngacanttnaacagaaccttagatgaagtgagggagggctcaggggacctgaggcaaagcagagggggccaccagtgcaaaggcgtgaggtaggatcgtgcttggggtgttcaagaaacaagaaggaggctggcgtgacgagcaccaaatgattgagcagaagtggagatgaagtcgcagagtgaactgagagtcagatggtggagggcattttatttca

SEQ ID NO: 291 - DNA, 748 bp, Homo sapien
gacgagttgatgggtgcagcaaaccaaaatggcacatgtatacctatgtatcaaacctgcacatagtgcacatgtaccccagaagttaaagtataagaaaaaaaaaaagagtgtagtgcagtcacccacgcactccggtcattcactcattcattcattcattcattcacaaaagaagcatttatgagttcctgctgtgtgccaggctctggcctaggcactgggaacagtgaacagaacagactcgactcagagctcaaggacttttagtccagttgaggagatcaatcatataattgatcaaataatcacagatttgtggtcgtaagtgtcctggggaaaactcaagcggaagggaagatgggagggtcaggtatatgtctgcgggtggagagtctgcagtttcctagagagtggtctgggaggcctctctgaagaggtgacatttgaacagaaccttagatgaagtgagggagggctcaggggacctgaggcaaagcagagggggccaccagtgcaaaggcgtgaggtaggatcgtgcttggggtgttcaagaaacaagaaggaggctggcgtgacgagcaccaaatgattgagcagaagtggagatgaagtcgcagagtgaactgagagtcagatggtggagggcattttatttcatttatttatttagagacagagtcttgctctggtgcccggctgtgattgcaccactgctctccagcctgggcgacaaagccacaccctg

SEQ ID NO: 292 - DNA, 567 bp, Homo sapien
  misc_feature (384)..(451): n=a, c, g or t
gctcattacaagaggccaggaaacagactctggtggctgagacccaggtggaggtggcggggagcagtgggtggttttctggactcattaaaaggcagagccaaagaactttggagggactggacatgaggctgagagaaggagaaagggggagttgggggcaagtccaagggctctggctgagcacctagaagggggcactgctaggcagggaaggtggagggaggggggagtctggagggggaagctgcatgtcaggagtctggagcagggtgagtttgatttgagacacccaggcacccatggagagagctgaatgagatggtaagaaacccaagctgcagggagatgagggagttgctggcatatggaggcacttaaagnnnnnnnnnnnnnnnnnnnnnnnnnnnnnnnnnnnnnnnnnnnnnnnnnnnnnnnnnnnnnnnnnnnnctacagagggcattttaggcagaggacttaggatttcattctgaaggcaatgggaggctcctggaggatttggaactggacggtaacttgaactgtttaaaaaaggccattctggg

SEQ ID NO: 293 - DNA, 539 bp, Homo sapien
aaaaaagaaaagaaaagaaaaaagaggcgagatcattaaaggagtgagtcagagaagaggcccttgtgggcttcctgctgtctacaagagaaaaggatgctgagacacgcctgccagtgaggcttcggagatcccagagactcggacacaccttggataagcaggctttctgactgggacctgagtctagctccttggcatcagtgtcccatttgtgtgtgtgcttgggtggttttctggactcattaaaaggcagagccaaagaactttggagggactggacatgaggctgagagaaggagaaagggggagttgggggcaagtccaagggctctggctgagcacctagaagggggcactgctaggcagggaaggtggagggaggggggagtctggagggggaagctgcatgtcaggagtctggagcagggtgagtttgatttgagacacccaggcacccatggagagagctgaatgagatggtaagaaacccaagctgcagggagatgagggagttgctggcatatggaggcacttaa

SEQ ID NO: 294 - DNA, 381 bp, Homo sapien
gctcattacaagaggccaggaaacagactctggtggctgagacccaggtggaggtggcggggagcagtgggtggttttctggactcattaaaaggcagagccaaagaactttggagggactggacatgaggctgagagaaggagaaagggggagttgggggcaagtccaagggctctggctgagcacctagaagggggcactgctaggcagggaaggtggagggaggggggagtctggagggggaagctgcatgtcaggagtctggagcagggtgagtttgatttgagacacccaggcacccatggagagagctgaatgagatggtaagaaacccaagctgcagggagatgagggagttgctggcatatggaggcacttaa

SEQ ID NO: 295 - DNA, 575 bp, Homo sapien
ggcgtgagcactgcacccggccattactcctcttcttacccacttgttatcttagaaaacttagcctactcctgccaagagtgtgggagggagagtacctgggaagagatgctcatcaggaatgcagaaggcaatagcacagagacctaacaggaacagcagcttgaggagccagaagctggttaggagggagaaagaaaaacagactcaggagaaaaggcaaaggacagtgaagagtgcctatggggaaaggcaaaagagaaaccaaaaatataggaaagaggacagacgagacaactaaggaggaaccaatcccaaatgagagggggctgggacaggcctactgcaccttattccaaattctaactcaaagatacttaatagcatctgggcaatgttttacagtttataaaggattgtgttaccaagataaccccactgttacctccattttagatgctagaagcacaaagtctggctcaaggttacacagcaagtacacgagaagcagggacttaaacctgttttctgtctttttacagtgctattacttcatcccgggaattcctttacca

SEQ ID NO: 296 - DNA, 416 bp, Homo sapien
ctttccagaacagcagcttgaggagccagaagctggttaggagggagaaagaaaaacagactcaggagaaaaggcaaaggacagtgaagagtgcctatggggaaaggcaaaagagaaaccaaaaatataggaaagaggacagacgagacaactaaggaggaaccaatcccaaatgagagggggctgggacaggcctactgcaccttattccaaattctaactcaaagatacttaatagcatctgggcaatgttttacagtttataaaggattgtgttaccaagataaccccactgttacctccattttagatgctagaagcacaaagtctggctcaaggttacacagcaagtacacgagaagcagggacttaaacctgttttctgtctttttacagtgctattacttcatcccgga

SEQ ID NO: 297 - DNA, 1258 bp, Homo sapien
ttttttttttttgagacagagtttcgctcttgttgcccaggctggagtgcagtggcgcgatctcagctcacggcaacctccgcctcccgggttcaagcgattctcctgcctcagcctctccagtagctgggattacaggcgtgtgccaccatgcctggctaattttgtatttttaggagagacggggtttctccacgttggtcaggctggtctcaaactcctgacttcatgatccacctgcctcggcctcccaaatatcacaatctatgtttctttctcttagactatcactttccccagcaaaaacaaacaaacaaacaaacaaaactaccctccaattttcagcctggggaatggagatagcatccgcatttaatctcttgtttctgagttcatcctggccttcagctatagtttgtgtcccccgacctggtcctcctactctctctgcagcttctcaatgtcagaggcagtcatgaggctgtgtgtgtgtgtgtgtgtgtgtgtgtgtgtgcgtgtgtgtgtgcatctaactccctgcacaaacttccaactcatcttccaactgatctaaaaccaatgaggttttgttttgtttttttttgagatggagtctcgccatgttgcccagactggtctcgaactcctggactcaaacgatcctcccacctcagcctcccaaagtgctgggattacaggcgtgagccactgcacccggccattactcctcttcttacccacttgttatcttagaaaacttagcctactcctgccaagagtgtgggagggagagtacctgggaagagatgctcatcaggaatgcagaaggcaatagcacagagacctaacaggaacagcagcttgaggagccagaagctggttaggagggagaaagaaaaacagactcaggagaaaaggcaaaggacagtgaagagtgcctatggggaaaggcaaaagagaaaccaaaaatataggaaagaggacagacgagacaactaaggaggaaccaatcccaaatgagagggggctgggacaggcctactgcaccttattccaaattctaactcaaagatacttaatagcatctgggcaatgttttacagtttataaaggattgtgttaccaagataaccccactgttacctccattttagatgctagaagcacaaagtctggctcaaggttacacagcaagtacacgagaagcagggacttaaacctgttttctgtctttttacagtgctattacttcatcccg

SEQ ID NO: 298 - DNA, 538 bp, Homo sapien
tcagtctggactctaccacttgggtctccagattttctgttacgtccttgtgggtcaggatatttctggaagtcactccgtgaggctggtgaaatagatatggcgaccgagggggatgtggagctggagttggagactgagaccagtggaccagagcggcctccggagaagccacggaaacatgacagcggtgcggcggacttggagcgggtcaccgactatgcagaggagaaggagatccagagttccaatctggagacggccatgtctgtgattggagacagaaggtcccgggagcagaaagccaaacaggagcgggagaaagaactggcaaaagtcactatcaagaaggaagatctggagctaataatgactgagatggagatatctcgagcagcagcagaacgcagtttgcgggaacacatgggcaacgtggtagaggcgcttattgccctaaccaactgatgcgtgctttctcaaatatacctactggattaatttatggcaataaaatttttttttgtctttttcagtttta

SEQ ID NO: 299 - DNA, 371 bp, Homo sapien
attactagtgaattcactagtaatattactagtgaattcactagtaatgcagcagaagcagaaaaaggcaaacgagaagaaggaggaacccaagtagctttgtggcttcgtgtccaaccctcttgcccttcgcctgtgtgcctggagccagtcccaccacgctcgcgtttcctcctgtagtgctcacaggtcccagcaccgatggcattccctttgccctgagtctgcagcgggtcccttttgtgcttccttcccctcaggtagcctctctccccctgggccactcccgggggtgagggggttaccccttcccagtgttttttattcctgtggggctcaccccaaagtattaaaagtagctttgtaattcc

SEQ ID NO: 300 - DNA, 560 bp, Homo sapien
aaactgtccccgcatgaggtcactctgcacggtcacgtgctcgagcccgcggagcgccacatcgccagccgcacccctccacccccaccctgcccacgtgacccggcctagtttctccaggcccgtccctacgttgccagaaggggcgggacctgcaacgtccgacagaacgaggggacgtaacggaggcaggttggagccgctgccgtcgccatgacccgcggtaaccagcgtgagctcgcccgccagaagaatatgaaaaagcagagcgactcggttaagggaaagcgccgagatgacgggctttctgctgccgcccgcaagcagagggactcggagatcatgcagcagaagcagaaaaaggcaaacgagaagaaggaggaacccaagtagctttgtggcttcgtgtccaaccctcttgcccttcgcctgtgtgcctggagccagtcccaccacgctcgcgtttcctcctgtagtgctcacaggtcccagcaccgatggcattccctttgccctgagtctgcagcgggtcctgcaggcagggatcctctagaacaccg

SEQ ID NO: 301 - DNA, 702 bp, Homo sapien
gaagaagagaccagaaattgatggaagctaggaggacatccttgcttcatacacctaaccctacatacttggtgacaccatttgcccttgaggagctagcttgccaagcaggtggttcaagctgggtggccccagtgggcctgacctccctgcacccccagccccttgagtgtctctctctcatggcctcccccaacagctggcctctaaggacggggctgtgctgtccgtgggagccgatgtccagtttcgcatctgggacccggtgctgtcggtgatgactgtgaaagacctgaacacagccacacgcatgacagcccagaacgccatgaccaaggccctgctcaagaggccgcaagcagagggactcggagatcatgcagcagaagcagaaaaaggcaaacgagaagaaggaggaacccaagtagctttgtggcttcgtgtccaaccctcttgcccttcgcctgtgtgcctggagccagtcccaccacgctcgcgtttcctcctgtagtgctcacaggtcccagcaccgatggcattccctttgccctgagtctgcagcgggtcccttttgtgcttccttcccctcaggtagcctctctccccctgggccactcccgggggtgagggggttaccccttcccagtgttttttattcctgtggggctcaccccaaagtattaaaagtagctttgtaattcc

SEQ ID NO: 302 - DNA, 4248 bp, Homo sapien
tttttttgagacagagtcttgctctgtcacccaggctagagtgcagtggtgtgatttcagctcactgcaacctctgcctcccgggttcaagtgattcttctgcctccacctcctgagcagctgggattacaggtgcgtgccaccatgcccggctaatattttgtatttttagtagagatggggtttcaccatgttagccaggattgtcttgatctcttgacctcgtgatccgcccgcctcagcctcccaaagtgctgggattacaggcgtgagccactgcacccggccattactcctcttcttacccacttgttatcttagaaaacttagcctactcctgccaagagtgtgggagggagagtacctgggaagagatgctcatcaggaatgcagaaggcaatagcacagagacctaacaggaacagcagcttgaggagccagaagctggttaggagggagaaagaaaaacagactcaggagaaaaggcaaaggacagtgaagagtgcctatggggaaaggcaaaagagaaaccaaaaatataggaaagaggacagacgagacaactaaggaggaaccaatcccaaatgagagggggctgggacaggcctactgcaccttattccaaattctaactcaaagatacttaatagcatctgggcaatgttttacagtttataaaggattgtgttaccaagataaccccactgttacctccattttagatgctagaagcacaaagtctggctcaaggttacacagcaagtacacgagaagcagggacttaaacctgttttctgtctttttacagtgctattacttcatcccggaatttcctttacccagcctatgtctactttccctcctctgtcccctccccacccagaaagtacacacaaacctattatgcagctgtgcccgcgggctggtgggggagtggaggtggaccagcaacacagcctgcagcaggtggaaggtggcggttcctgcacatactcggtacacagccccagagccactgagcactggacagtcagagaggccaaacaggtgggcacacaaccccgagggcatctggatctgggagtgtgtgtgtgagaaatggcaggacaagtcataatgcatggaaaggtacctacttgtcacgggtatgaccactcatttgtctcctgcccccaaccgaaaccttttctatcttagggtttttccttttatctcttcccacctgacaacccgaccccctctcacttaccctgtgtgtcttgccccacaccctttccactactgtccttgacagcaggaggcagcagattgctgaggcccccacatggaggaggatgtagaacaggcggctgcaagtggatgcggtgagagagggccacctagagtggcagcagctggcacaaggagcaggcccacagcagcacacctgggagtagagcagatgcaaggcagcgaggtggagacttgctgaggaaaggcatacgttaatgtatgtgtgaggttaacccaggaggttgaattccaaaatttccccttcccctttcttccttttactcaggttctgtttcaagctgattccagccatttgggattgccgcccactgacaacttagtagggctttcattataagcaggcttgagatatctgacctttctctcgacctaaacacctggggctggaaacatggcgggagagatttacagattatacctggggcaacgaaccagaacgacattagaggagaaaagaggcctgtcgtttttattggcttctgcacgtcttcctccccagcttcggccactctccccttcgcaccctctcacctgacagaagggacttttcactaggacactgctgcctccgctgtgctgctgtgccaggcccagggaggtgccggggctggggccggccttggcacccaccatccttgtcccagggattaggcttaggtccaccagatggaaggcagatgagagcagcagttgcttctgtcctcagcccattggactgccactgtgttggggctgagcacccggtcccgggcagaatggagacgtccggaagagaacactgacctccaggttgcggtaaatgcaaatgccctgtgaaggagctttgtccttagggcctcaacactgcggccactcaggctgttctctccagattagggggcagtttgtctatctggccccctgtggattagcattctttattggtttaggattagacgtcattcaggttgaacggagttccctgaggtgggtgggtgcgtgtttatgtgttgaggggactattcctagtttatgaggtggttaaggatatcggtggggtgggctggagcggtgtcgggttaggtctgagagaaggcctcgcacaaaacactgtacaaacccgaaaggaagtctgagagacgaaccgccttcctccctgaagcttctagaactggagcagaaagaaggtgtggcccagggccagccccgcctcctccccgggcggaagctgtgtcagttgccggaagtcggcgtgaggtggggcttatgcggcggcgtggtgaaatagatatggcgaccgagggggatgtggagctggagttggagactgagaccagtggaccagagcggcctccggagaagccacggaaacatgacagcggtgcggcggacttggagcgggtcaccgactatgcagaggagaaggagatccagagttccaatctggagacgggagaaagaactggcaaaagtcactatcaagaaggaagatctggagctaatagtgagtggtagtgcctaactagtgtatgcggaggggaggctattctgcttaatttgggttgtttcctgaaacaagcggagtcagtatatttggtggcacattaatgcctgggaacctatgtaacatgatttttttctgcagatgactgagatggagatatctcgagcagcagcagaacgcagtttgcgggaacacatgggcaacgtggtagaggcgcttattgccctaaccaactgatgcgtgctttctcaaatatacctactggattaatttatggcaataaaatttttttttgtctttttcagttttatcatcttgggtcaagtagagtgtatactatatcctatgttgtggagaatttatatgttggagactaactgaatttaagtgacccattaaaatctagcacacctgtatgaaaaatcagtgtagaagaatacctcatgtgcagatgctaggtggcaggccagtctcattcatctgactagctctcaacagtattcaaggtacatctggagtctcagcagagttactgtactcaaatggcatgtgtctccaagacagcttatgaatatctaaaaggccagctacctgcctaggagccactatatatatagatagatgtaggttatgaacccagttcataggccaccttgagttagaattttggtacctacaacatgcttgattttgagtgattaaaaaaaaataatttggctgggtgctgtggctcacgcctctaatcccagcactttgggaggtcgaggcaggtagatcacgaggtcaggaattcaagaccagcctggccaacatgtgaaaccccgtctccactgaaaatagaaaaattagctgggcatggtggtgggcgcctataatcccagctattctggaggctgaggcaggaatcgcttgaaattggaaagcagaggttgcagtgagctgagatcacactactgtactactgtactccagcctgggggaaagagtgaaactccatctcaaaaaaaaaaaaaaaaaaaagcccgggcacagtggctcacacctgtaatcccagcactttgggaggctgaggcagtcggatcatgaggtcaggagttgaagacaagcctggccaacatggtgaaaccctgtctctactaaaaatacaaaaaaaataaaattagccaggcgtggtggtgcatgcctgtagtcccagctactcaggaggctgaagcagaagaattgcttgaaccagggaggcggaagttgcagtgagctgagattgtgccactgtactccagcctgggtgacagagcgagactgtctcaaaaacaaaacaacaaaaaagaatttaggggccaggcatggtggctcatgcctgtaatcccaacaccttgggaagctgaggcaagacgatcacttgagcccagcagtttgagaccagcttgggcaacacagtgagatttcgtctctaccgcgctccccccaccacc

SEQ ID NO: 303 - DNA, 450 bp, Homo sapien
aaactgtccccgcatgaggtcactctgcacggtcacgtgctcgagcccgcggagcgccacatcgccagccgcacccctccacccccaccctgcccacgtgacccggcctagtttctccaggcccgtccctacgttgccagaaggggcgggacctgcaacgtccgacagaacgaggggacgtaacggaggcaggttggagccgctgccgtcgccatgacccgcggtaaccagcgtgagctcgcccgccagaagaatatgaaaaagcagagcgactcggttaagggaaagcgccgagatgacgggctttctgctgccgcccgcaagcagagggactcggagatcatgcagcagaagcagaaaaaggcaaacgagaagaaggaggaacccaagtagctttgtggcttcgtgtccaccctctgccaacagccgtcgagggaccgtcagaacgca

SEQ ID NO: 304 - DNA, 555 bp, Homo sapien
  misc_feature (1)..(1): n=a, c, g or t
  misc_feature (13)..(13): n=a, c, g or t
  misc_feature (26)..(26): n=a, c, g or t
  misc_feature (41)..(41): n=a, c, g or t
  misc_feature (63)..(63): n=a, c, g or t
ncggtaaggcttngatattcgaaacncggcccgccttcgantacggcttgcggagaagaccgncagaagggggaagccaggttggagccgctgccgtcgccatgacccgcggtaaccagcgtgagctcgcccgccagaagaatatgaaaaagcagagcgactcggttaagggaaagcgccgagatgacgggctttctgctgccgcccgcaagcagagggactcggagatcatgcagcagaagcagaaaaaggcaaacgagaagaaggaggaacccaagtagctttgtggcttcgtgtccaaccctcttgcccttcgcctgtgtgcctggagccagtcccaccacgctcgcgtttcctcctgtagtgctcacaggtcccagcaccgatggcattccctttgccctgagtctgcagcgggtcccttttgtgcttccttcccctcaggtagcctctctccccctgggccactcccgggggtgagggggttaccccttcccagtgttttttattcctgtggggctcaccccaaagtattaaaagtagctttgtaattcc

SEQ ID NO: 305 - DNA, 523 bp, Homo sapien
gcagagcattggcaggaggggcaaggtggaacagttatctccagaagaagaagagaaaaggagaatccgaatggtgaaatagatatggcgaccgagggggatgtggagctggagttggagactgagaccagtggaccagagcggcctccggagaagccacggaaacatgacagcggtgcggcggacttggagcgggtcaccgactatgcagaggagaaggagatccagagttccaatctggagacggccatgtctgtgattggagacagaaggtcccgggagcagaaagccaaacaggagcgggagaaagaactggcaaaagtcactatcaagaaggaagatctggagctaataatgactgagatggagatatctcgagcagcagcagaacgcagtttgcgggaacacatgggcaacgtggtagaggcgcttattgccctaaccaactgatgcgtgctttctcaaatatacctactggattaatttatggcaataaaatttttttttgtctttttcagtttta

SEQ ID NO: 306 - DNA, 897 bp, Homo sapien
aaactgtccccgcatgaggtcactctgcacggtcacgtgctcgagcccgcggagcgccacatcgccagccgcacccctccacccccaccctgcccacgtgacccggcctagtttctccaggcccgtccctacgttgccagaaggggcgggacctgcaacgtccgacagaacgaggggacgtaacggaggcaggttggagccgctgccgtcgccatgacccgcggtaaccagcgtgagctcgcccgccagaagaatatgaaaaagcagagcgactcggttaagggaaagcgccgagatgacgggctttctgctgccgcccgcaagcagaggcttctagaactggagcagaaagaaggtgtggcccagggccagccccgcctcctccccgggcggaagctgtgtcagttgccggaagtcggcgtgaggtggggcttatgcggcggcgtggtgaaatagatatggcgaccgagggggatgtggagctggagttggagactgagaccagtggaccagagcggcctccggagaagccacggaaacatgacagcggtgcggcggacttggagcgggtcaccgactatgcagaggagaaggagatccagagttccaatctggagacggccatgtctgtgattggagacagaaggtcccgggagcagaaagccaaacaggagcgggagaaagaactggcaaaagtcactatcaagaaggaagatctggagctaataatgactgagatggagatatctcgagcagcagcagaacgcagtttgcgggaacacatgggcaacgtggtagaggcgcttattgccctaaccaactgatgcgtgctttctcaaatatacctactggattaatttatggcaataaaatttttttttgtctttttcagtttta

SEQ ID NO: 307 - DNA, 374 bp, Homo sapien
ccccgactagcccgacaggaggaaacggaagcagagggactcggagatcatgcagcagaagcagaaaaaggcaaacgagaagaaggaggaacccaagtagctttgtggcttcgtgtccaaccctcttgcccttcgcctgtgtgcctggagccagtcccaccacgctcgcgtttcctcctgtagtgctcacaggtcccagcaccgatggcattccctttgccctgagtctgcagcgggtcccttttgtgcttccttcccctcaggtagcctctctccccctgggccactcccgggggtgagggggttaccccttcccagtgttttttattcctgtggggctcaccccaaagtattaaaagtagctttgtaattcc

SEQ ID NO: 308 - DNA, 3142 bp, Homo sapien
tttttttgagacagagtcttgctctgtcacccaggctagagtgcagtggtgtgatttcagctcactgcaacctctgcctcccgggttcaagtgattcttctgcctccacctcctgagcagctgggattacaggtgcgtgccaccatgcccggctaatattttgtatttttagtagagatggggtttcaccatgttagccaggattgtcttgatctcttgacctcgtgatccgcccgcctcagcctcccaaagtgctgggattacaggcgtgagccactgcacccggccattactcctcttcttacccacttgttatcttagaaaacttagcctactcctgccaagagtgtgggagggagagtacctgggaagagatgctcatcaggaatgcagaaggcaatagcacagagacctaacaggaacagcagcttgaggagccagaagctggttaggagggagaaagaaaaacagactcaggagaaaaggcaaaggacagtgaagagtgcctatggggaaaggcaaaagagaaaccaaaaatataggaaagaggacagacgagacaactaaggaggaaccaatcccaaatgagagggggctgggacaggcctactgcaccttattccaaattctaactcaaagatacttaatagcatctgggcaatgttttacagtttataaaggattgtgttaccaagataaccccactgttacctccattttagatgctagaagcacaaagtctggctcaaggttacacagcaagtacacgagaagcagggacttaaacctgttttctgtctttttacagtgctattacttcatcccggaatttcctttacccagcctatgtctactttccctcctctgtcccctccccacccagaaagtacacacaaacctattatgcagctgtgcccgcgggctggtgggggagtggaggtggaccagcaacacagcctgcagcaggtggaaggtggcggttcctgcacatactcggtacacagccccagagccactgagcactggacagtcagagaggccaaacaggtgggcacacaaccccgagggcatctggatctgggagtgtgtgtgtgagaaatggcaggacaagtcataatgcatggaaaggtacctacttgtcacgggtatgaccactcatttgtctcctgcccccaaccgaaaccttttctatcttagggtttttccttttatctcttcccacctgacaacccgaccccctctcacttaccctgtgtgtcttgccccacaccctttccactactgtccttgacagcaggaggcagcagattgctgaggcccccacatggaggaggatgtagaacaggcggctgcaagtggatgcggtgagagagggccacctagagtggcagcagctggcacaaggagcaggcccacagcagcacacctgggagtagagcagatgcaaggcagcgaggtggagacttgctgaggaaaggcatacgttaatgtatgtgtgaggttaacccaggaggttgaattccaaaatttccccttcccctttcttccttttactcaggttctgtttcaagctgattccagccatttgggattgccgcccactgacaacttagtagggctttcattataagcaggcttgagatatctgacctttctctcgacctaaacacctggggctggaaacatggcgggagagatttacagattatacctggggcaacgaaccagaacgacattagaggagaaaagaggcctgtcgtttttattggcttctgcacgtcttcctccccagcttcggccactctccccttcgcaccctctcacctgacagaagggacttttcactaggacactgctgcctccgctgtgctgctgtgccaggcccagggaggtgccggggctggggccggccttggcacccaccatccttgtcccagggattaggcttaggtccaccagatggaaggcagatgagagcagcagttgcttctgtcctcagcccattggactgccactgtgttggggctgagcacccggtcccgggcagaatggagacgtccggaagagaacactgacctccaggttgcggtaaatgcaaatgccctgtgaaggagctttgtccttagggcctcaacactgcggccactcaggctgttctctccagattagggggcagtttgtctatctggccccctgtggattagcattctttattggtttaggattagacgtcattcaggttgaacggagttccctgaggtgggtgggtgcgtgtttatgtgttgaggggactattcctagtttatgaggtggttaaggatatcggtggggtgggctggagcggtgtcgggttaggtctgagagaaggcctcgcacaaaacactgtacaaacccgaaaggaagtctgagagacgaaccgccttcctccctgaagcttctagaactggagcagaaagaaggtgtggcccagggccagccccgcctcctccccgggcggaagctgtgtcagttgccggaagtcggcgtgaggtggggcttatgcggcggcgtggtgaaatagatatggcgaccgagggggatgtggagctggagttggagactgagaccagtggaccagagcggcctccggagaagccacggaaacatgacagcggtgcggcggacttggagcgggtcaccgactatgcagaggagaaggagatccagagttccaatctggagacggccatgtctgtgattggagacagaaggtcccgggagcagaaagccaaacaggagcgggagaaagaactggcaaaagtcactatcaagaaggaagatctggagctaatagtgagtggtagtgcctaactagtgtatgcggaggggaggctattctgcttaatttgggttgtttcctgaaacaagcggagtcagtatatttggtggcacattaatgcctgggaacctatgtaacatgatttttttctgcagatgactgagatggagatatctcgagcagcagcagaacgcagtttgcgggaacacatgggcaacgtggtagaggcgcttattgccctaaccaactgatgcgtgctttctcaaatatacctactggattaatttatggcaataaaatttttttttgtctttttcagtttta

SEQ ID NO: 309 - DNA, 448 bp, Homo sapien
aaactgtccccgcatgaggtcactctgcacggtcacgtgctcgagcccgcggagcgccacatcgccagccgcacccctccacccccaccctgcccacgtgacccggcctagtttctccaggcccgtccctacgttgccagaaggggcgggacctgcaacgtccgacagaacgaggggacgtaacggaggcaggttggagccgctgccgtcgccatgacccgcggtaaccagcgtgagctcgcccgccagaagaatatgaaaaagcagagcgactcggttaagggaaagcgccgagatgacgggctttctgctgccgcccgcaagcagagggactcggagatcatgcagcagaagcagaaaaaggcaaacgagaagaaggaggaacccaagtagctttgtggcttcgtgtccaacaatgtgccgggctccgatttcagcatcggggcag

SEQ ID NO: 310 - DNA, 775 bp, Homo sapien
gggaaacagactattagatggaaatgagcatgcctgggatttcattagagtatgttcttgagatcagcacctgtggaaggcaagacaaggaattggggtcatacagaggatgactgtgagctgcagtgctcattgggtgtgatgctctttggaggctgtgcacctgtggaaggcaacgcaagaaagtagggctgtgcagagggtgaaggtgagctgcaatgctcagtggatgtgatgctcattggaggctatgcccactctacggaccttcttaaactagtgggagaccctctagagtggtccaggacggggcaagctgccccaggaaggaggagagactttgggcaaagcggctgtctttagctgagacactccctataggtgaccactcccagcagctggaggagcagtggtgcctttatctctgaaggggagtccaggcacctgaccacagtgcccatcacaggcagggaaaggatgtgaaagcactgtctgcacattgttgatttaaaaaaatcatacattgatgaaatgtaaaaagtgaaagttcagtttgcctttttaacttaattctgtttatgatttacatatttccatgtcccagcctgttgatctacctaaattaaaatatgtatattttaaaagatttattgataagataagaaaatgtttacaaaatagtattacatgcaaaaagatgaaacaaaaattgtatatagaatcatttctcagttatatatgtatatgggtttgagtgtgtaaatgcatttaaaac

SEQ ID NO: 311 - DNA, 1170 bp, Homo sapien
ataccaaaagtgttagaagagctaacggtcaaacagggaatggtaggacccttaggcaaccctgagaagagtaacagaaggaagccgctaccacctggagagcaggaagggcaaaagaaaaaggtgatgaaaccagagcttgggagctagggcttcgctgtagcagctgggaccctgggcagatgcagccactgcaggggtcccacccggagcagggaggacaaggtagatacattctgatttctcctttcctcccaccctccaatgttctctttcctgttggcctctcctggtctgatgcttggagtctgggagtctgggaagtgtagtagtcaaagttacttctctgagttggcggatcaaaagaaaaggcagtaacacaacttgggtttcttgggaaacagactattagatggaaatgagcatgcctgggatttcattagagtatgttcttgagatcagcacctgtggaaggcaagacaaggaattggggtcatacagaggatgactgtgagctgcagtgctcattgggtgtgatgctctttggaggctgtgcacctgtggaaggcaacgcaagaaagtagggctgtgcagagggtgaaggtgagctgcaatgctcagtggatgtgatgctcattggaggctatgcccactctacggaccttcttaaactagtgggagaccctctagagtggtccaggagggggcaagctgccccaggaaggaggagagactttgggcaaagcggctgtctttagctgagacactccctataggtgaccactcccagcagctggaggagcagtggtgcctttatctctgaaggggagtccaggcacctgaccacagtgcccatcacaggcagggaaaggatgtgaaagcactgtctgcacattgttgatttaaaaaaatcatacattgatgaaatgtaaaaagtgaaagttcagtttgcctttttaacttaattctgtttatgatttacatatttccatgtcccagcctgttgatctacctaaattaaaatatgtatattttaaaagatttattgataagataagaaaatgtttacaaaatagtattacatgcaaaaagatgaaacaaaaattgtatatagaatcatttctcagttatatatgtatatgggtttgagtgtgtaaatgcatttaaaac

SEQ ID NO: 312 - DNA, 568 bp, Homo sapien
gagctctctgccccttgctccatcaccatagccccagtggggcctccagtgcagctggaccttggggcctgcagggcaggaggctagaacagatacattccaaggccctgtctcactaggccctgtgccccttggctgcttattgtgattctagcagaggagccaaggactctcgctgctaaaaaaacccaggggctggtccccaatggcatgtgtttgtggtgcaggtacaaaccgtttccataggactcacttttctttccattccctcggcgaagagcagaggttgaagaaatgctacttgggcccgagagtgcgacagagagctgctttcctgtcttccctgccctctccccacaccccaacctggcactcttgaaagaaaactttttaaatattcaaaccatagtctcttcctcttgaaaaacctttaggggaggacatcacagcccctttaagttccagttgctctggggtcacagttggacagttaagtctaatgtctactctatgtctaatgtctaactctgccacttcctctgcttctctgatgaaagacgagaagcaa

SEQ ID NO: 313 - DNA, 576 bp, Homo sapien
gagctctctgccccttgctccatcaccatagccccagtggggcctccagtgcagctggaccttggggcctgcagggcaggaggctagaacagatacattccaaggccctgtctcactaggccctgtgccccttggctgcttattgtgattctagcagaggagccaaggactctcgctgctaaaaaaacccaggggctggtccccaatggcatgtgtttgtggtgcaggtacaaaccgtttccataggactcacttttctttccattccctcggcgaagagcagaggttgaagaaatgctacttgggcccgagagtgcgacagagagctgctttcctgtcttccctgccctctccccacaccccaacctggcactcttgaaagaaaactttttaaatattcaaaccatagtctcttcctcttgaaaaacctttaggggaggacatcacagcccctttaagtcccagttgctctggggtcacagttggacagttaagtctaatgtctactctatgtctaatgtctaactctgccacttcctctgcttctctgatgaagacgagaagcaagtgctctca

SEQ ID NO: 314 - DNA, 943 bp, Homo sapien
  misc_feature (569)..(593): n=a, c, g or t
gtgggattttaggaccattacagtaaactgtaatctcggtttagtgatagctggtgctcaaagcgtgcacctgagcctcatgttggttttctgctgtcagtcacttaaaacttacaccatggttttttcctcttgtgaactccagtatttaaggagattggaagctctgaatctctgggtttgcctggaagaagtatgtactttgctttgccagacctgagatgctttacaaatcatcttgtctgcccagttcagtggagtgagattagaataggtctaacatcctttgaaaacataggcccatggtgaggtttgcaggtaactgagatcacagctggctctgaagaaaaaatgcagcctcttgggagtggccagtccaggtacctataattgaggaagtgacctgattggggaggtgacttatttaccctgggcaattaagaagcatttattgaacacctactatgtgccctaggctctgtgctgtggggatgacaagatgcataaggctcaacttctcctcctaaagtatttacagtgggcttgggaaagcaaggcttatgtgtgtnnnnnnnnnnnnnnnnnnnnnnnnncaggagattttcgcaacagttcagctcaatcatagaagaaaaaccacaaggtagttcatgactaatgtccatctgcctgaaggaggcagcggtgggtgtggggagtgttttctgtgggctagggagggcctggaaagcttcctggaggagggagcagaggtggcggcagcagcagcatttgatctggatcctgatgggtagttgcagtgcagatggataagttgggagtaaaaagagagcatctctagtgggtgttgaggccagagaaaatggggaattgcctgctttgaaggtgggcagcgggaaatgaggctaggcaggtgagtttaggacagatgcaaagaggcttt

SEQ ID NO: 315 - DNA, 571 bp, Homo sapien
gtgggattttaggaccattacagtaaactgtaatctcggtttagtgatagctggtgctcaaagcgtgcacctgagcctcatgttggttttctgctgtcagtcacttaaaacttacaccatggttttttcctcttgtgaactccagtatttaaggagattggaagctctgaatctctgggtttgcctggaagaagtatgtactttgctttgccagacctgagatgctttacaaatcatcttgtctgcccagttcagtggagtgagattagaataggtctaacatcctttgaaaacataggcccatggtgaggtttgcaggtaactgagatcacagctggctctgaagaaaaaatgcagcctcttgggagtggccagtccaggtacctataattgaggaagtgacctgattggggaggtgacttatttaccctgggcaattaagaagcatttattgaacacctactatgtgccctaggctctgtgctgtggggatgacaagatgcataaggctcaacttctcctcctaaagtatttacagtgggcttgggaaagcaaggcttatgtgtgtaaa

SEQ ID NO: 316 - DNA, 1002 bp, Homo sapien
ggaaatccttccttatccttcaaagcccaacacgatcaccacctcctccaagaagccttgcctgattgtctccgtggccacaaagtggtgactcaggaggaaaagagagaagtaaaggcgcatcatgggtgaagaaatgacctgagaacttgaaatccaagcccggcccatgcaggctgtttttcttagtccttcctcgcagcagggctgaggtgggagaaaccggctgtaagcacactcagtgggatgatttgtggatcgcctcctggacacctcagagtgctaccttgagtgaggggagaacagctgtcctctcatctcatcacctagaataagagagaaggcctgtctgtcacctgcaccaccaaagcttgagcactatcaatttgggaagaagcggctgtagtggtcatccagacagcacctaactccccagggaagcaggctccattcttctcatccctacctgtttttcccatgggtagggggtgtggataaactgtggaaggcagaaatgacaccctggcttgtcatcatcccccagatttcagggtggagggactctcgcagtcacccaacctgcctgctctctggggctgacctgccttcccactgggacccctccctcccatccaggcccattggctggccccccgagcaggagggaaaacaccctccagcccatgggatttgttgctttctttccctctccacagggacctgacaagcctccagtccagctctgttccaaagccttccagactccctgatgtctgcatttgcatggaatccaatcttctacacaaccccctcacctccagcccagccctttcttcaaacccccagcctaggtaaatagcaaataaccctcattaacatttcctagatgttgtattctgctcttttctgttgtataaaacatgatacaaaagacagcccaaaaagaaacaaaacgccctgcttgtgtgttatttacagcaggcctcttctaatctaatcatc

SEQ ID NO: 317 - DNA, 1281 bp, Homo sapien
ggaaatccttccttatccttcaaagcccaacacgatcaccacctcctccaagaagccttgcctgattgtctccgtggccacaaagtggtgactcaggaggaaaagagagaagtaaaggcgcatcatgggtgaagaaatgacctgagaacttgaaatccaagcccggcccatgcaggctgtttttcttagtccttcctcgcagcagggctgaggtgggagaaaccggctgtaagcacactcagtgggatgatttgtggatcgcctcctggacacctcagagtgctaccttgagtgaggggagaacagctgtcctctcatctcatcacctagaataagagagaaggcctgtctgtcacctgcaccaccaaagcttgagcactatcaatttgggaagaagcggctgtagtggtcatccagacagcacctaactccccagggaagcaggctccattcttctcatccctacctgtttttcccatgggtagggggtgtggataaactgtggaaggcagaaatgacaccctggcttgtcatcatcccccagatttcagggtggagggactctcgcagtcacccaacctgcctgctctctggggctgacctgccttcccactgggacccctccctcccatccaggcccattggctggccccccgagcaggagggaaaacaccctccagcccatgggatttgttgctttctttccctctccacagggacctgacaagcctccagtccagctctgttccaaagccttccagactccctgatgtctgcatttgcatggaatcccttcagtgatgggatagtacacttcactcagaggcatttgcatctttaaataatttcttaaaagcctctaaagtgatcagtgccttgatgccaactaaggaaatttgtttagcattgaatctctgaaggctctatgaaaggaatagcatgatgtgctgttagaatcagatgttactgctaaaatttacatgttgtgatgtaaattgtgtagaaaaccattaaatcattcaaaataataaactatttttattagagaatgtatacttttagaaagctgtctccttatttaaataaaatagtgtttgtctgtagttcagtgttggggcaatcttgggggggattcttctctaatctttcagaaactttgtctgcgaacactctttaatggaccagatcaggatttgagcggaagaacgaatgtaactttaaggccaggataagcaccaaatttctcattctatcataaagtgatgagcatataataattcc

SEQ ID NO: 318 - DNA, 1002 bp, Homo sapien
ggaaatccttcctatccttcaaagcccaacacgatcaccacctcctccaagaagccttgcctgattgtctccgtggccacaaagtggtgactcaggaggaaaagagagaagtaaaggcgcatcatgggtgaagaaatgacctgagaacttgaaatccaagcccggcccatgcaggctgtttttcttagtccttcctcgcagcagggctgaggtgggagaaaccggctgtaagcacactcagtgggatgatttgtggatcgcctcctggacacctcagagtgctaccttgagtgaggggagaacagctgtcctctcatctcatcacctagaataagagagaaggcctgtctgtcacctgcaccaccaaagcttgagcactatcaatttgggaagaagcggctgtagtggtcatccagacagcacctaactccccagggaagcaggctccattcttctcatccctacctgtttttcccatgggtagggggtgtggataaactgtggaaggcagaaatgacacccctggcttgtcatcatcccccagatttcagggtggagggactctcgcagtcacccaacctgcctgctctctggggctgacctgccttcccactgggacccctccctcccatccaggcccattggctggccccccgagcaggagggaaaacaccctccagcccatgggatttgttgctttctttccctctccacagggacctgacaagcctccagtccagctctgttccaaagccttccagactccctgatgtctgcatttgcatggaatccaatcttctacacaaccccctcacctccagcccagccctttcttcaaacccccagcctaggtaaatagcaaataaccctcattaacatttcctagatgttgtattctgctcttttctgttgtataaaacatgatacaaaagacagcccaaaaagaaacaaaacgccctgcttgtgtgttatttacagcaggcctcttctaatctaatcatc

SEQ ID NO: 319 - DNA, 155 bp, Homo sapien
gctcgaggaaggatatccataaggtcctggaagcagcagttggctgcctctagacaaggagatacattttttattgtatgccctttcgtactgcctaatttttgttttgttttatagtctatttattattggtaggaacgtaataggtgcacata

SEQ ID NO: 320 - DNA, 779 bp, Homo sapien
tccagtcagcctcagctcagatgaactcaaattttatttctgcaactttatattaaaataacctcacaaaatttagaattcttaagagaactcttgataccctatagtaaattctactataggtgaatttctatcttaactcaccttagattgtttttatggtaatctctttccacgtactcagccttgaagagagattctactttttgtctcacttacatacctactttgatgtcagaatctttcccttcagccaatgctacacatagccccatccccacatagctttagtagtcacactaaagctagtaaaacatgtaattgatttcctgttttcgtatgtgtgtaagacttaggaattggtcaactatatagcatgttggctgagagcactgactttggaattaaatcaacctgagtttgagtcttgattatgttgctgaattacctatatttgtccttacagtaattattttgatcttttaagttagtttctcctctgaaataaatatgcctataccctacctcacagggtggttgtgaggattaagtagattgatggatgtggagcacttagattagtgcctgaaacattgaaagggctcaagaattgtagttctgttgtattacttaatgtcataatagtaaacaaatttactcatctttggttacttggccagtttattttggaaagtcttagagactagctttaggaaaatctgtctaaatgcatttcattttagacaagtagggagtttttatccattgataatagtcta

SEQ ID NO: 321 - DNA, 965 bp, Homo sapien
tccttagagagacagggtctcgctatgttacccagactggagcacagtggctgttcatgggcgctttgtggctcatgcagcctcaaacccctgggctcaagcgatcctcctgcctcagtcccccaggtagctgggactacaggctcacaccactgcactcagcttacatttgaatgtatttaagtaactccagtcagcctcagctcagatgaactcaaattttatttctgcaactttatattaaaataacctcacaaaatttagaattcttaagagaactcttgataccctatagtaaattctactataggtgaatttctatcttaactcaccttagattgtttttatggtaatctctttccacgtactcagccttgaagagagattctactttttgtctcacttacatacctactttgatgtcagaatctttcccttcagccaatgctacacatagccccatccccacatagctttagtagtcacactaaagctagtaaaacatgtaattgatttcctgttttcgtatgtgtgtaagacttaggaattggtcaactatatagcatgttggctgagagcactgactttggaattaaatcaacctgagtttgagtcttgattatgttgctgaattacctatatttgtccttacagtaattattttgatcttttaagttagtttctcctctgaaataaatatgctatacctacctcacagggtggttgtgaggattaagtagattgatggatgtggagcacttagattagtgcctgaaacattgaaagggctcaagaattgtagttctgttgtattacttaatgtcataatagtaaacaaatttactcatctttggttacttggccagtttattttggaaagtcttagagactagctttaggaaaatctgtctaaatgcatttcattttagacaagtagggagtttttatccattgataatagtcta

SEQ ID NO: 322 - DNA, 651 bp, Homo sapien
atcctccgcctcagtctcccgagtagctggattacaggcagggtcaccacagacagcttagccattaatatcattgttgttatttttgctagaagaaaaataagtttccagggatgtttgcaagatattgtcattcaatgtttaactcacagttcggggattgtaactttcaacctcacttcaggtatggtatgtaagaaatgaaatacgcccactttggttttacacaaattctgtttgtctgatctactgtacttcaaacacataggctggtttactagaacaattcagggcactgtgtccacatgttttccctagacgtgggtccctagagtaacaccgaccaccaatagcaatttgggtataaacatactctcacaggacaaactggctcctttgaagatggtcatgaaataaatatcccagaattcccactcattccacggacattaaggaagtgagatgattacgggggagtcgacaaaggtgggaaggtaaccgatggatgggaggggaaggttgtggtgctcacggccacatcaataaggctcaatacattccttggggacaggaagaagaaattcaactagtttcttgaaaggcggtcctgaaattcacaggggagagcggatattccaggaggcagtataa

SEQ ID NO: 323 - DNA, 324 bp, Homo sapien
gtttttagtttgcattcattatattggcaactggcttgagaaatatattttaatgtaagtaaaaaaaaaagcagacttgattattttataaaatttgagatgtgtaatgttgatcttcaataataacagctaatttacattaaataattgttgtgtattactgcatgttgtagatagattatcttagttaatagttcatgcagtcataccttgtggtatttttattccagctttaccagtgaggaaaccgacactgtgaggttagtaatcatcagagctcaggtttgcatcctgaaagaccacagagctgccaggtgcggtggc

SEQ ID NO: 324 - DNA, 3369 bp, Homo sapien
ccttccagctgcgtcgaagcttctctggtttcgcattacatttcccagagggccttggggcacagtccaatgaggagcgagccgggtggccggctgaggggcgtgcttcatgctcgcgggatttttaaaaatggtttctcctggatcttatcccaactgcgcctgagaccttgtttcacctcctgatgtgctgggtgtggttaggcctcgagccgggagctatttgcctcccaggaggaagccagggcagggttccgcggggaatggcggtgagggagccactcgggacgcggaggccctaaaatgaagaagcttcggcctgaggcttcgggagcggcgagcagggaagtgggagtgtgtgtgagtggtgtgtgtgtgtgtgtgtgtgtgtgtgtgaataagccagaggctgcctggtggggccccgccgtggcccagtgactgagataattgtcttcgtctgtggggtaatgcgaacaagccccgttcccctaagccgtgatgcatgcggggttgacgcggccgggctctgtccccataaactgtgacacaggtgtgtgtagacgtctatgagggccatagcgccgggctgtaagggcatctgtaggggtgacgcagccgggctgtgtctctgcacctccgttctgtgcgaggtcaatgctggtggggtctgcagaggtggcacggccaggacgggtctccgtgtctctgaaatgtgcctttgcacttctgtcaggttgacagggacaggcagtgtctctctggtgtgagcgtctgtgggtgtgaaagggccagcgagtgtgcggctgtgactggtcgggatcgggcctggatgcatggccttttgagtgagcacaggtgtgtgcgaccatgtcacctgtctttctagtgtctccgttgcttcctgtgccttggccttccagccatgtggtacctgctagggagcagtggtcccaaagtgacgtgagaggctctacgctattgtgaaaatgaccaagaagaaggcttcacaagtcacgagatggcagttttggagccagaagtgctctccgtgcacactacctggacgacaagaggaagtaacctcaagaatagaattccttttggggaagaaagagctggccttcaggaaaagcatcccggaggaggaagaagaagtgttatatgtcctaaagtaaggtttcaggccagcatccttcagaaaaagcatccccgaggaggaagacgaatcgttaaacatcttaggtcagctctagcctctcggaatttgtcttcttcagtggaaaccccgagaagactgatcagttcttcagttctaaaacaatggcccagggtttggtgacgttcgccgacgtagccatagacttttctcaggaggagtgggcctgtctgaactctgctcagagggacctgtactgggacgtgatgctggagaactacagtaacttggtctcactggatttggagtcagcatatgaaaataagagtttacctacagaaaaaaacattcatgaaataagggcttccaaaaggaattcagatagaagaagtaaatcccttggccgtaactggatatgtgaaggtacgcttgaaagaccacagcgctccagagggaggtatccactgcgggtcttcgaacgtacccccctcaggtgagaggggactgctgtacaaagaatataggaaggcctctagactacatccattccttcctcaacaggaggaaaattcctggtacagtttaacgtaaggcttcactgatcactgttgtttttgtttttgtttttgtttttttgagacagagtctcactcttgcccaggctggagtgcagtggcacggtcttggctcactgcaacctccacctcccaggttccagcaattctcctgcctcagcctccccagtagctgggattacagacatgcaccaccacacctggctaatttttgtatttttagtagagacagttttcaccatgttgtccaggctggtctcaactcctgacctcaggtgatccacccaccttgccctcccaaagtgctaggattacaggcgtgagccactgcacctagcccactgatcactcttctgcttacagaatatcagaagtcattctagaggcaaatttgaagagtggaaaaatcactttttctgaatgatcttgtttttggtgtagatgtttttattgtgtgggttagtttaatgaatacataaagactaccagtaccattctgtctttactccgtggcatctgtggaataaccctgctaatgtaacacgtgagaaagcctttggtcatgccacccactctaccagttgtccccaccatcccccgccctcctccctgtgagacactgggccaaaggctcactacccctgtgcgttgtccagcacacagacactatgtgcattatttgtacataaggataatcacatctacctgagactgctatcatggaaattaaatgtttggtacatgtaaagtctttgaaagtgtaactggaatattgtgtaattttaataaataataactattgttgtttttatgatcattactaccatttgtgttgccattagtgaatttttacaagaaaactccctgtgggtgcaatgagtctggaaaagaccattgagtcttctagaagaaaacattaagagattattggcacagccgtgggttacgcaatgatttcttagtacacaaaacacagcaaacataaaaagttgttacacttcatcaaaagtacaaagttctgttcatcaaatgatgctgttaagatagggaaaagacaagaaacaggactggaagaagatgtttgctctaaggtacacctgacaaaggaactctcatagaaaatataaagaatccctcaagttgaaaaaaaaatcaatttaaaggggagaaaacttcagcacgtctcaacagaagaccaccaaatggccaataagtaagtgaaaatgtattcaatgtcattgctcctcaaggaactgtagagtaaaaccacaatgtgctgtcactctagacagtcaccaggatgattaaatttaaatcacaataacaaggctgatttcagatgtctcaccacaaagaaggaggataagggagcgaggtgatggatatgttaattagcttgatttaatccttccacattgtatacatgtatcagaacatcacattgtactccatcaatataatacaattattatttgtcaatcaaatattaataaaatcaaagatgaaaaaaaaaaaatmcaaaawwraaaataaagtatggcgatagaaattgaacctkgcgcaatagatatagtaccgcaaggggatgwtatmaccargcataatwtagcaaggctcccctatacctcttgcatg

SEQ ID NO: 325 - DNA, 1996 bp, Homo sapien
  misc_feature (8)..(8): n=a, c, g or t
  misc_feature (17)..(17): n=a, c, g or t
  misc_feature (24)..(25): n=a, c, g or t
gggggttncccggtcgnctggtgnnggacagcgagagattccatcacgctactcagaagggcacaccatttgagacttaaaattctttatttctggaattgttctattttgttagttactgttggtaatctcttactgtgcctaatttataaattaaactttagatatgtatgtacaggaaaaaatgtagtatatagtatcgtatatatgtacaggaaaaaaacgtactatctgtggtttcaggtatccactgcgggtcttcgaacgtacccccctcaggtgagaggggactgctgtacaaagaatataggaaggcctctagactacatccattccttcctcaacaggaggaaaattcctggtacagtttaacgtaaggcttcactgatcactgttgtttttgtttttgtttttgtttttttgagacagagtctcactcttgcccaggctggagtgcagtggcacggtcttggctcactgcaacctccacctcccaggttccagcaattctcctgcctcagcctccccagtagctgggattacagacatgcaccaccacacctggctaatttttgtatttttagtagagacagttttcaccatgttgtccaggctggtctcaactcctgacctcaggtgatccacccaccttgccctcccaaagtgctaggattacaggcgtgagccactgcacctagcccactgatcactcttctgcttacagaatatcagaagtcattctagaggcaaatttgaagagtggaaaaatcactttttctgaatgatcttgtttttggtgtagatgtttttattgtgtgggttagtttaatgaatacataaagactaccagtaccattctgtctttactccgtggcatctgtggaataaccctgctaatgtaacacgtgagaaagcctttggtcatgccacccactctaccagttgtccccaccatcccccgccctcctccctgtgagacactgggccaaaggctcactacccctgtgcgttgtccagcacacagacactatgtgcattatttgtacataaggataatcacatctacctgagactgctatcatggaaattaaatgtttggtacatgtaaagtctttgaaagtgtaactggaatattgtgtaattttaataaataataactattgttgtttttatgatcattactaccatttgtgttgccattagtgaatttttacaagaaaactccctgtgggtgcaatgagtctggaaaagaccattgagtcttctagaagaaaacattaagagattattggcacagccgtgggttacgcaatgatttcttagtacacaaaacacagcaaacataaaaagttgttacacttcatcaaaagtacaaagttctgttcatcaaatgatgctgttaagatagggaaaagacaagaaacaggactggaagaagatgtttgctctaaggtacacctgacaaaggaactctcatagaaaatataaagaatccctcaagttgaaaaaaaaatcaatttaaaggggagaaaacttcagcacgtctcaacagaagaccaccaaatggccaataagtaagtgaaaatgtattcaatgtcattgctcctcaaggaactgtagagtaaaaccacaatgtgctgtcactctagacagtcaccaggatgattaaatttaaatcacaataacaaggctgatttcagatgtctcaccacaaagaaggaggataagggagcgaggtgatggatatgttaattagcttgatttaatccttccacattgtatacatgtatcagaacatcacattgtactccatcaatataatacaattattatttgtcaatcaaatattaataaaatcaaagatgaaaaaaaaaaaatmcaaaawwraaaataaagtatggcgatagaaattgaacctkgcgcaatagatatagtaccgcaaggggatgwtatmaccargcataatwtagcaaggctcccctatacctcttgcatg

SEQ ID NO: 326 - DNA, 1453 bp, Homo sapien
ccaatctgaagtgggagcggccgtaatttttgtatttttagtagagacagttttcaccatgttgtccaggctggtctcaactcctgacctcaggtgatccacccaccttgccctcccaaagtgctaggattacaggcgtgagccactgcacctagcccactgatcactcttctgcttacagaatatcagaagtcattctagaggcaaatttgaagagtggaaaaatcactttttctgaatgatcttgtttttggtgtagatgtttttattgtgtgggttagtttaatgaatacataaagactaccagtaccattctgtctttactccgtggcatctgtggaataaccctgctaatgtaacacgtgagaaagcctttggtcatgccacccactctaccagttgtccccaccatcccccgccctcctccctgtgagacactgggccaaaggctcactacccctgtgcgttgtccagcacacagacactatgtgcattatttgtacataaggataatcacatctacctgagactgctatcatggaaattaaatgtttggtacatgtaaagtctttgaaagtgtaactggaatattgtgtaattttaataaataataactattgttgtttttatgatcattactaccatttgtgttgccattagtgaatttttacaagaaaactccctgtgggtgcaatgagtctggaaaagaccattgagtcttctagaagaaaacattaagagattattggcacagccgtgggttacgcaatgatttcttagtacacaaaacacagcaaacataaaaagttgttacacttcatcaaaagtacaaagttctgttcatcaaatgatgctgttaagatagggaaaagacaagaaacaggactggaagaagatgtttgctctaaggtacacctgacaaaggaactctcatagaaaatataaagaatccctcaagttgaaaaaaaaatcaatttaaaggggagaaaacttcagcacgtctcaacagaagaccaccaaatggccaataagtaagtgaaaatgtattcaatgtcattgctcctcaaggaactgtagagtaaaaccacaatgtgctgtcactctagacagtcaccaggatgattaaatttaaatcacaataacaaggctgatttcagatgtctcaccacaaagaaggaggataagggagcgaggtgatggatatgttaattagcttgatttaatccttccacattgtatacatgtatcagaacatcacattgtactccatcaatataatacaattattatttgtcaatcaaatattaataaaatcaaagatgaaaaaaaaaaaatmcaaaawwraaaataaagtatggcgatagaaattgaacctkgcgcaatagatatagtaccgcaaggggatgwtatmaccargcataatwtagcaaggctcccctatacctcttgcatg

SEQ ID NO: 327 - DNA, 856 bp, Homo sapien
actatagacgatccccgagtacgctacttttatgatcattactaccatttgtgttgccattagtgaatttttacaagaaaactccctgtgggtgcaatgagtctggaaaagaccattgagtcttctagaagaaaacattaagagattattggcacagccgtgggttacgcaatgatttcttagtacacaaaacacagcaaacataaaaagttgttacacttcatcaaaagtacaaagttctgttcatcaaatgatgctgttaagatagggaaaagacaagaaacaggactggaagaagatgtttgctctaaggtacacctgacaaaggaactctcatagaaaatataaagaatccctcaagttgaaaaaaaaatcaatttaaaggggagaaaacttcagcacgtctcaacagaagaccaccaaatggccaataagtaagtgaaaatgtattcaatgtcattgctcctcaaggaactgtagagtaaaaccacaatgtgctgtcactctagacagtcaccaggatgattaaatttaaatcacaataacaaggctgatttcagatgtctcaccacaaagaaggaggataagggagcgaggtgatggatatgttaattagcttgatttaatccttccacattgtatacatgtatcagaacatcacattgtactccatcaatataatacaattattatttgtcaatcaaatattaataaaatcaaagatgaaaaaaaaaaaatmcaaaawwraaaataaagtatggcgatagaaattgaacctkgcgcaatagatatagtaccgcaaggggatgwtatmaccargcataatwtagcaaggctcccctatacctcttgcatg

SEQ ID NO: 328 - DNA, 2244 bp, Homo sapien
ccttccagctgcgtcgaagcttctctggtttcgcattacatttcccagagggccttggggcacagtccaatgaggagcgagccgggtggccggctgaggggcgtgcttcatgctcgcgggatttttaaaaatggtttctcctggatcttatcccaactgcgcctgagaccttgtttcacctcctgatgtgctgggtgtggttaggcctcgagccgggagctatttgcctcccaggaggaagccagggcagggttccgcggggaatggcggtgagggagccactcgggacgcggaggccctaaaatgaagaagcttcggcctgaggcttcgggagcggcgagcagggaagtgggagtgtgtgtgagtggtgtgtgtgtgtgtgtgtgtgtgtgtgtgaataagccagaggctgcctggtggggccccgccgtggcccagtgactgagataattgtcttcgtctgtggggtaatgcgaacaagccccgttcccctaagccgtgatgcatgcggggttgacgcggccgggctctgtccccataaactgtgacacaggtgtgtgtagacgtctatgagggccatagcgccgggctgtaagggcatctgtaggggtgacgcagccgggctgtgtctctgcacctccgttctgtgcgaggtcaatgctggtggggtctgcagaggtggcacggccaggacgggtctccgtgtctctgaaatgtgcctttgcacttctgtcaggttgacagggacaggcagtgtctctctggtgtgagcgtctgtgggtgtgaaagggccagcgagtgtgcggctgtgactggtcgggatcgggcctggatgcatggccttttgagtgagcacaggtgtgtgcgaccatgtcacctgtctttctagtgtctccgttgcttcctgtgccttggccttccagccatgtggtacctgctagggagcagtggtcccaaagtgacgtgagaggctctacgctattgtgaaaatgaccaagaagaaggcttcacaagtcacgagatggcagttttggagccagaagtgctctccgtgcacactacctggacgacaagaggaagtaacctcaagaatagaattccttttggggaagaaagagctggccttcaggaaaagcatcccggaggaggaagaagaagtgttatatgtcctaaagtaaggtttcaggccagcatccttcagaaaaagcatccccgaggaggaagacgaatcgttaaacatcttaggtcagctctagcctctcggaatttgtcttcttcagtggaaaccccgagaagactgatcagttcttcagttctaaaacaatggcccagggtttggtgacgttcgccgacgtagccatagacttttctcaggaggagtgggcctgtctgaactctgctcagagggacctgtactgggacgtgatgctggagaactacagtaacttggtctcactgggtgagttgcacgcctcagataacttagactgcctcctggaatatccgctctcccctgtgaatttcaggaccgcctttcaagaaactagttgaatttcttcttcctgtccccaaggaatgtattgagccttattgatgtggccgtgagcaccacaaccttcccctcccatccatcggttaccttcccacctttgtcgactcccccgtaatcatctcacttccttaatgtccgtggaatgagtgggaattctgggatatttatttcatgaccatcttcaaaggagccagtttgtcctgtgagagtatgtttatacccaaattgctattggtggtcggtgttactctagggacccacgtctagggaaaacatgtggacacagtgccctgaattgttctagtaaaccagcctatgtgtttgaagtacagtagatcagacaaacagaatttgtgtaaaaccaaagtgggcgtatttcatttcttacataccatacctgaagtgaggttgaaagttacaatccccgaactgtgagttaaacattgaatgacaatatcttgcaaacatccctggaaacttatttttcttctagcaaaaataacaacaatgatattaatggctaagctgtctgtggtgaccctgcctgtaatcccagctactcgggagactgaggcaggaggatcacttgagcccaggatgagtgaggcaggagaattgctgggacctgggaggcagaggctgcagtgagtcaagatcatgccactgcactccagcctgggcaacagagcaag

SEQ ID NO: 329 - DNA, 1249 bp, Homo sapien
ccttccagctgcgtcgaagcttctctggtttcgcattacatttcccagagggccttggggcacagtccaatgaggagcgagccgggtggccggctgaggggcgtgcttcatgctcgcgggatttttaaaaatggtttctcctggatcttatcccaactgcgcctgagaccttgtttcacctcctgatgtgctgggtgtggttaggcctcgagccgggagctatttgcctcccaggaggaagccagggcagggttccgcggggaatggcggtgagggagccactcgggacgcggaggccctaaaatgaagaagcttcggcctgaggcttcgggagcggcgagcagggaagtgggagtgtgtgtgagtggtgtgtgtgtgtgtgtgtgtgtgtgtgtgaataagccagaggctgcctggtggggccccgccgtggcccagtgactgagataattgtcttcgtctgtggggtaatgcgaacaagccccgttcccctaagccgtgatgcatgcggggttgacgcggccgggctctgtccccataaactgtgacacaggtgtgtgtagacgtctatgagggccatagcgccgggctgtaagggcatctgtaggggtgacgcagccgggctgtgtctctgcacctccgttctgtgcgaggtcaatgctggtggggtctgcagaggtggcacggccaggacgggtctccgtgtctctgaaatgtgcctttgcacttctgtcaggttgacagggacaggcagtgtctctctggtgtgagcgtctgtgggtgtgaaagggccagcgagtgtgcggctgtgactggtcgggatcgggcctggatgcatggccttttgagtgagcacaggtgtgtgcgaccatgtcacctgtctttctagtgtctccgttgcttcctgtgccttggccttccagccatgtggtacctgctagggagcagtggtcccaaagtgacgtgagaggctctacgctattgtgaaaatgaccaagaagaaggcttcacaagtcacgagatggcagttttggagccagaagtgctctccgtgcacactacctggacgacaagaggaagtaacctcaagaatagaattccttttggggaagaaagagctggccttcaggaaaagcatcccggaggaggaagaagaagtgttatatgtcctaaagtaaggtttcagcaagcaagggacaccgaatagcagctccggcagcttgtgctagcggcctgcagagaattccag

SEQ ID NO: 330 - DNA, 1238 bp, Homo sapien
ccttccagctgcgtcgaagcttctctggtttcgcattacatttcccagagggccttggggcacagtccaatgaggagcgagccgggtggccggctgaggggcgtgcttcatgctcgcgggatttttaaaaatggtttctcctggatcttatcccaactgcgcctgagaccttgtttcacctcctgatgtgctgggtgtggttaggcctcgagccgggagctatttgcctcccaggaggaagccagggcagggttccgcggggaatggcggtgagggagccactcgggacgcggaggccctaaaatgaagaagcttcggcctgaggcttcgggagcggcgagcagggaagtgggagtgtgtgtgagtggtgtgtgtgtgtgtgtgtgtgtgtgtgtgaataagccagaggctgcctggtggggccccgccgtggcccagtgactgagataattgtcttcgtctgtggggtaatgcgaacaagccccgttcccctaagccgtgatgcatgcggggttgacgcggccgggctctgtccccataaactgtgacacaggtgtgtgtagacgtctatgagggccatagcgccgggctgtaagggcatctgtaggggtgacgcagccgggctgtgtctctgcacctccgttctgtgcgaggtcaatgctggtggggtctgcagaggtggcacggccaggacgggtctccgtgtctctgaaatgtgcctttgcacttctgtcaggttgacagggacaggcagtgtctctctggtgtgagcgtctgtgggtgtgaaagggccagcgagtgtgcggctgtgactggtcgggatcgggcctggatgcatggccttttgagtgagcacaggtgtgtgcgaccatgtcacctgtctttctagtgtctccgttgcttcctgtgccttggccttccagccatgtggtacctgctagggagcagtggtcccaaagtgacgtgagaggctctacgctattgtgaaaatgaccaagaagaaggcttcacaagtcacgagatggcagttttggagccagaagtgctctccgtgcacactacctggacgacaagaggaagtaacctcaagaatagaattccttttggggaagaaagaggtacctgacgtgggaggcggggaggtggtgagaggggcagctccatgtttcagaaccccagttcctagagttttccagcatttctctgaaaaactcacatgcctgtgccctcttatttct

SEQ ID NO: 331 - DNA, 1289 bp, Homo sapien
gcggccgctgggtgcgcgtgcgcatgcgcgctggcctccagggggtggcgggaccgagtgtgtgacgcacttgcgtgggagtacgaggctgacgcggcggccctgtccccgtaactgtgacacgggtgcacgcgagcgtcattgggggcgatgggggccgtgctgggtgcgcgtttgcaccagtgacgcagccgctgcatctccgccagtccgcgcaggtgagattggtgcgcgtggctccgaggggagacgggcacggggcttctgacggtgacgcacttgctggagagtgtggggtgacacagccgggctctccccataactggtgaccgggggtgctccagaggctttgggtcaacgcagcccgtgcctgtgaacctcggcggtgcgtccctgggactctgctccgtgaggtgcgctctgggggttgtgcgggggcagcggtcgggacgggtctccgtggcccacggatgcacctctgcaccgtgtggggtggtggggcccgtagcatggccgtgctgggcgttagtgggtatgaggggcgcagatgtgtctcaggacagagtgagctgtggtgaggctgagctgtgcagacttgtgctgggatgggtgatcgggccttctgggtgacgcaggtgtgtgtgacaacacaacctgtagcttcagcgtctctgtgctgggatggatgatcgggccttctgagtgatgcaggtgtgtgtgacagtgcaacttgtagctccagcgtctctgctgcttcccctgccttcacctcctaaccaagcggtacctgcctgagaacaagggccgcggagggacgtgagcgcctgagcctcgcctggaaattcaccagcaagaaggcagaaacagccatgaggtgacgctttcagagccagaagtgctgtgcatgcaggccacctgagtgacaggggacggtggcctcaggagtagaattcctcctgtagagggacaggtccctgatgtgggagacagggaggggggcagctccacgcgtcatcatctcaatcgccacagcgtgctcttcaggaatctcccagaaactccatctcggggcctcgtatttctcattggttttattaggtatggcaggtgttacccttccggttctgttttccccaggccagcatccttcagaaaaagcatccccgaggaggaagacgaatcgttaaacatctgaaagggtcaggtgagtatccttttttttttatattaaatgatatgtgtttataagacttaagaccaaacattaaaggtagatgaccaagatttga

SEQ ID NO: 332 - DNA, 4483 bp, Homo sapien
ccttccagctgcgtcgaagcttctctggtttcgcattacatttcccagagggccttggggcacagtccaatgaggagcgagccgggtggccggctgaggggcgtgcttcatgctcgcgggatttttaaaaatggtttctcctggatcttatcccaactgcgcctgagaccttgtttcacctcctgatgtgctgggtgtggttaggcctcgagccgggagctatttgcctcccaggaggaagccagggcagggttccgcggggaatggcggtgagggagccactcgggacgcggaggccctaaaatgaagaagcttcggcctgaggcttcgggagcggcgagcagggaagtgggagtgtgtgtgagtggtgtgtgtgtgtgtgtgtgtgtgtgtgtgaataagccagaggctgcctggtggggccccgccgtggcccagtgactgagataattgtcttcgtctgtggggtaatgcgaacaagccccgttcccctaagccgtgatgcatgcggggttgacgcggccgggctctgtccccataaactgtgacacaggtgtgtgtagacgtctatgagggccatagcgccgggctgtaagggcatctgtaggggtgacgcagccgggctgtgtctctgcacctccgttctgtgcgaggtcaatgctggtggggtctgcagaggtggcacggccaggacgggtctccgtgtctctgaaatgtgcctttgcacttctgtcaggttgacagggacaggcagtgtctctctggtgtgagcgtctgtgggtgtgaaagggccagcgagtgtgcggctgtgactggtcgggatcgggcctggatgcatggccttttgagtgagcacaggtgtgtgcgaccatgtcacctgtctttctagtgtctccgttgcttcctgtgccttggccttccagccatgtggtacctgctagggagcagtggtcccaaagtgacgtgagaggctctacgctattgtgaaaatgaccaagaagaaggcttcacaagtcacgagatggcagttttggagccagaagtgctctccgtgcacactacctggacgacaagaggaagtaacctcaagaatagaattccttttggggaagaaagagctggccttcaggaaaagcatcccggaggaggaagaagaagtgttatatgtcctaaagtaaggtttcaggccagcatccttcagaaaaagcatccccgaggaggaagacgaatcgttaaacatcttaggtcagctctagcctctcggaatttgtcttcttcagtggaaaccccgagaagactgatcagttcttcagttctaaaacaatggcccagggtttggtgacgttcgccgacgtagccatagacttttctcaggaggagtgggcctgtctgaactctgctcagagggacctgtactgggacgtgatgctggagaactacagtaacttggtctcactggatttggagtcagcatatgaaaataagagtttacctacagaaaaaaacattcatgaaataagggcttccaaaaggaattcagatagaagaagtaaatcccttggccgtaactggatatgtgaaggtacgcttgaaagaccacagcgctccagagggaggtatgtcaatcagatgatcatcaattatgtcaaaaggcctgctactagagaaggcacccctcctagaacacatcagagacatcataaggagaattcctttgaatgtaaggactgtgggaaggcctttagtcgtggctatcaacttagtcaacatcagaaaatccatactggtgagaaaccttatgaatgtaaagaatgtaagaaggccttccgttggggcaatcagcttactcaacatcaaaaaattcatactggggaaaccctatgggtgtacagaatgtgggaagagctttagtcacggccatcagcttacacaacatcagaaaacgcacagtggggcgaaatcctacgaatgtaaggagtgcgggaaggcatgtaaccacctaaaccatctccgagaacatcagaggatccacaacagttgaagagccttttgaacgcagtagcccgctcgtatctatggtttcgctttccacagtttgttacctgcagtcaactgcagttcaaaaatattaaatggaaaattccagaaataaagaattttaagtctcaaatggtgtgcccttctgagtagcgtgatgaaatctctcgctgtccggctccagccggccggggatgtgagtcatcccttggtccagcacatccacgctgtatacgccacccaccctgctagtgacttagtagccgtcttggtgatcagatcaactatcccagcatcacagtgcctgtgcccaagcagtcctcactttgcttaacagtggccccagagagcaggagtagtgatgctggtgattcggatatgccaaagagaagccacaaagtgcttccttttaaatgaaaaggtgaaagttctcaacttaaaacagaaaagaaaaaaatcatatactgaggttgctaagatctacatgacaataagatattttgggagagagatacgttcacataattttattacatatattgttacaattgttctattttgttagttactgttggtaatctcttactgtgcctaatttataaattaaactttagatatgtatgtacaggaaaaaatgtagtatatagtatcgtatatatgtacaggaaaaaaacgtactatctgtggtttcaggtatccactgcgggtcttcgaacgtacccccctcaggtgagaggggactgctgtacaaagaatataggaaggcctctagactacatccattccttcctcaacaggaggaaaattcctggtacagtttaacgtaaggcttcactgatcactgttgtttttgtttttgtttttgtttttttgagacagagtctcactcttgcccaggctggagtgcagtggcacggtcttggctcactgcaacctccacctcccaggttccagcaattctcctgcctcagcctccccagtagctgggattacagacatgcaccaccacacctggctaatttttgtatttttagtagagacagttttcaccatgttgtccaggctggtctcaactcctgacctcaggtgatccacccaccttgccctcccaaagtgctaggattacaggcgtgagccactgcacctagcccactgatcactcttctgcttacagaatatcagaagtcattctagaggcaaatttgaagagtggaaaaatcactttttctgaatgatcttgtttttggtgtagatgtttttattgtgtgggttagtttaatgaatacataaagactaccagtaccattctgtctttactccgtggcatctgtggaataaccctgctaatgtaacacgtgagaaagcctttggtcatgccacccactctaccagttgtccccaccatcccccgccctcctccctgtgagacactgggccaaaggctcactacccctgtgcgttgtccagcacacagacactatgtgcattatttgtacataaggataatcacatctacctgagactgctatcatggaaattaaatgtttggtacatgtaaagtctttgaaagtgtaactggaatattgtgtaattttaataaataataactattgttgtttttatgatcattactaccatttgtgttgccattagtgaatttttacaagaaaactccctgtgggtgcaatgagtctggaaaagaccattgagtcttctagaagaaaacattaagagattattggcacagccgtgggttacgcaatgatttcttagtacacaaaacacagcaaacataaaaagttgttacacttcatcaaaagtacaaagttctgttcatcaaatgatgctgttaagatagggaaaagacaagaaacaggactggaagaagatgtttgctctaaggtacacctgacaaaggaactctcatagaaaatataaagaatccctcaagttgaaaaaaaaatcaatttaaaggggagaaaacttcagcacgtctcaacagaagaccaccaaatggccaataagtaagtgaaaatgtattcaatgtcattgctcctcaaggaactgtagagtaaaaccacaatgtgctgtcactctagacagtcaccaggatgattaaatttaaatcacaataacaaggctgatttcagatgtctcaccacaaagaaggaggataagggagcgaggtgatggatatgttaattagcttgatttaatccttccacattgtatacatgtatcagaacatcacattgtactccatcaatataatacaattattatttgtcaatcaaatattaataaaatcaaagatgaaaaaaaaaaaatmcaaaawwraaaataaagtatggcgatagaaattgaacctkgcgcaatagatatagtaccgcaaggggatgwtatmaccargcataatwtagcaaggctcccctatacctcttgcatg

SEQ ID NO: 333 - DNA, 2736 bp, Homo sapien
ccttccagctgcgtcgaagcttctctggtttcgcattacatttcccagagggccttggggcacagtccaatgaggagcgagccgggtggccggctgaggggcgtgcttcatgctcgcgggatttttaaaaatggtttctcctggatcttatcccaactgcgcctgagaccttgtttcacctcctgatgtgctgggtgtggttaggcctcgagccgggagctatttgcctcccaggaggaagccagggcagggttccgcggggaatggcggtgagggagccactcgggacgcggaggccctaaaatgaagaagcttcggcctgaggcttcgggagcggcgagcagggaagtgggagtgtgtgtgagtggtgtgtgtgtgtgtgtgtgtgtgtgtgtgaataagccagaggctgcctggtggggccccgccgtggcccagtgactgagataattgtcttcgtctgtggggtaatgcgaacaagccccgttcccctaagccgtgatgcatgcggggttgacgcggccgggctctgtccccataaactgtgacacaggtgtgtgtagacgtctatgagggccatagcgccgggctgtaagggcatctgtaggggtgacgcagccgggctgtgtctctgcacctccgttctgtgcgaggtcaatgctggtggggtctgcagaggtggcacggccaggacgggtctccgtgtctctgaaatgtgcctttgcacttctgtcaggttgacagggacaggcagtgtctctctggtgtgagcgtctgtgggtgtgaaagggccagcgagtgtgcggctgtgactggtcgggatcgggcctggatgcatggccttttgagtgagcacaggtgtgtgcgaccatgtcacctgtctttctagtgtctccgttgcttcctgtgccttggccttccagccatgtggtacctgctagggagcagtggtcccaaagtgacgtgagaggctctacgctattgtgaaaatgaccaagaagaaggcttcacaagtcacgagatggcagttttggagccagaagtgctctccgtgcacactacctggacgacaagaggaagtaacctcaagaatagaattccttttggggaagaaagagctggccttcaggaaaagcatcccggaggaggaagaagaagtgttatatgtcctaaagtaaggtttcaggctggagtgcaatggcatgatctcagctcactggaacctctgcgtcctgggttgcagcgattctcctgcctcagcctcccaagtagctggaattataggcacccaccaccatgcctggctaatttttgtatttttagtagagacgggttttcaccatgttgtccaggctggtctcaactcctgacctcaggtgatccacccaccttgccctcccaaagtgctaggattacaggcgtgagccactgcacctagcccactgatcactcttctgcttacagaatatcagaagtcattctagaggcaaatttgaagagtggaaaaatcactttttctgaatgatcttgtttttggtgtagatgtttttattgtgtgggttagtttaatgaatacataaagactaccagtaccattctgtctttactccgtggcatctgtggaataaccctgctaatgtaacacgtgagaaagcctttggtcatgccacccactctaccagttgtccccaccatcccccgccctcctccctgtgagacactgggccaaaggctcactacccctgtgcgttgtccagcacacagacactatgtgcattatttgtacataaggataatcacatctacctgagactgctatcatggaaattaaatgtttggtacatgtaaagtctttgaaagtgtaactggaatattgtgtaattttaataaataataactattgttgtttttatgatcattactaccatttgtgttgccattagtgaatttttacaagaaaactccctgtgggtgcaatgagtctggaaaagaccattgagtcttctagaagaaaacattaagagattattggcacagccgtgggttacgcaatgatttcttagtacacaaaacacagcaaacataaaaagttgttacacttcatcaaaagtacaaagttctgttcatcaaatgatgctgttaagatagggaaaagacaagaaacaggactggaagaagatgtttgctctaaggtacacctgacaaaggaactctcatagaaaatataaagaatccctcaagttgaaaaaaaaatcaatttaaaggggagaaaacttcagcacgtctcaacagaagaccaccaaatggccaataagtaagtgaaaatgtattcaatgtcattgctcctcaaggaactgtagagtaaaaccacaatgtgctgtcactctagacagtcaccaggatgattaaatttaaatcacaataacaaggctgatttcagatgtctcaccacaaagaaggaggataagggagcgaggtgatggatatgttaattagcttgatttaatccttccacattgtatacatgtatcagaacatcacattgtactccatcaatataatacaattattatttgtcaatcaaatattaataaaatcaaagatgaaaaaaaaaaaatmcaaaawwraaaataaagtatggcgatagaaattgaacctkgcgcaatagatatagtaccgcaaggggatgwtatmaccargcataatwtagcaaggctcccctatacctcttgcatg

SEQ ID NO: 334 - DNA, 1475 bp, Homo sapien
ccttccagctgcgtcgaagcttctctggtttcgcattacatttcccagagggccttggggcacagtccaatgaggagcgagccgggtggccggctgaggggcgtgcttcatgctcgcgggatttttaaaaatggtttctcctggatcttatcccaactgcgcctgagaccttgtttcacctcctgatgtgctgggtgtggttaggcctcgagccgggagctatttgcctcccaggaggaagccagggcagggttccgcggggaatggcggtgagggagccactcgggacgcggaggccctaaaatgaagaagcttcggcctgaggcttcgggagcggcgagcagggaagtgggagtgtgtgtgagtggtgtgtgtgtgtgtgtgtgtgtgtgtgtgaataagccagaggctgcctggtggggccccgccgtggcccagtgactgagataattgtcttcgtctgtggggtaatgcgaacaagccccgttcccctaagccgtgatgcatgcggggttgacgcggccgggctctgtccccataaactgtgacacaggtgtgtgtagacgtctatgagggccatagcgccgggctgtaagggcatctgtaggggtgacgcagccgggctgtgtctctgcacctccgttctgtgcgaggtcaatgctggtggggtctgcagaggtggcacggccaggacgggtctccgtgtctctgaaatgtgcctttgcacttctgtcaggttgacagggacaggcagtgtctctctggtgtgagcgtctgtgggtgtgaaagggccagcgagtgtgcggctgtgactggtcgggatcgggcctggatgcatggccttttgagtgagcacaggtgtgtgcgaccatgtcacctgtctttctagtgtctccgttgcttcctgtgccttggccttccagccatgtggtacctgctagggagcagtggtcccaaagtgacgtgagaggctctacgctattgtgaaaatgaccaagaagaaggcttcacaagtcacgagatggcagttttggagccagaagtgctctccgtgcacactacctggacgacaagaggaagtaacctcaagaatagaattccttttggggaagaaagagctggccttcaggaaaagcatcccggaggaggaagaagaagtgttatatgtcctaaagtaaggtttcaggctggagtgcaatggcatgatctcagctcactggaacctctgcgtcctgggttgcagcgattctcctgcctcagcctcccaagtagctggaattataggcacccaccaccatgcctggctaatttttgtatttttagtagagacggggtttcatcatgttggccaggctggtctcgaactcctgatttcaagttatctgcccgcctcagcctcccaaagtcctgggattacaggtgtgagccaccatgccctgcctttgtcccaatttttaatcaaatttttttttcac

SEQ ID NO: 335 - DNA, 645 bp, Homo sapien
tgttcgagaagatctgctgtgcagtggaacaagtcctggagacgggtgtggagtcaaaggagagggctttgttttgttttgaagatgagagataccacagcgttcttgtgtatggatagggatgactcaaaagacaggaagaaagtaatgattggaggagaaaggaggattcattgcactccctctttgcaggagtgaagtatttaagaaggggaagaagatgggatgcaacataggtgagaaggggtaggccttggggttagtctgtgtaaactgtgcagaagatggaactagatttgatcattctttttccctctaaaagcaaactattgaaatttctatttatgtgaggctttcctatttaatttcatagtcctagtagtaatagccacaagcctctttccatttgacccattcttgttcttcatgaaggactgaggatattgtttgtgcacagttctgaaataaggagaaaatagtactcacaatctagttagggaggcaagactaacaagtgagctttaccgtcagtaatatgtagtctgagtctgtgccatacatatttggataataggtgaatggtggggtacggaggatggacaacagtctgctggaactggagcagagtgccccagcctccacagt

SEQ ID NO: 336 - DNA, 690 bp, Homo sapien
  misc_feature (690)..(690): n=a, c, g or t
tgttcgagaagatctgctgtgcagtggaacamgtcctgkagacgggtgtggagtcaaaggagagggctttgttttgttttgaagatgagagataccacagcgttcttgtgtatggatagggatgactcaaaagacaggaagaaagtaatgattggaggagaaaggaggattcattgcactccctctttgcaggagtgaagtatttaagaaggggaagaagatgggatgcaacataggtgagaaggggtaggccttggggttagtctgtgtaaactgtgcagaagatggaactagatttgatcattctttttccctctaaaagcaaactattgaaatttctatttatgtgaggctttcctatttaatttcatagtcctagtagtaatagccacaagcctctttccatttgacccattcttgttcttcatgaaggactgaggatattgtttgtgcacagttctgaaataaggagaaaatagtactcacaatctagttagggaggcaagactaacaagtgagctttaccgtcagtaatatgtagtctgagtctgtgccatacatatttggataataggtgaatggtggggtacggaggatggacaacagtctgctggaactggagcagagtgccccagmctccacagtttgtcatttttgggccagacagttatctgttgcgggaactcctcn

SEQ ID NO: 337 - DNA, 636 bp, Homo sapien
  misc_feature (636)..(636): n=a, c, g or t
tgttcgagaagatctgctgtgcagtggaacamgtcctgkagacgggtgtggagtcaaaggagagggctttgttttgttttgaagatgagagataccacagcgttcttgtgtatggatagggatgactcaaaagacaggaagaaagtaatgattggaggagaaaggaggattcattgcactccctctttgcaggagtgaagtatttaagaaggggaagaagatgggatgcaacataggtgagaaggggtaggccttggggttagtctgtgtaaactgtgcagaagatggaactagatttgatcattctttttccctctaaaagcaaactattgaaatttctatttatgtgaggctttcctatttaatttcatagtcctagtagtaatagccacaagcctctttccatttgacccattcttgttcttcatgaaggactgaggatattgtttgtgcacagttctgaaataaggaggtcagtaatatgtagtctgagtctgtgccatacatatttggataataggtgaatggtggggtacggaggatggacaacagtctgctggaactggagcagagtgccccagmctccacagtttgtcatttttgggccagacagttatctgttgcgggaactcctcn

SEQ ID NO: 338 - DNA, 105 bp, Homo sapien
cagctatcagaatggatagcaatccaaagtaaccgacagccccgcatgctggcgagcacgcagagcaacaaggagagccttcacttctggtgggagtcaaatggc

SEQ ID NO: 339 - DNA, 483 bp, Homo sapien
tgaagtgtctagcggttacaaggtgtgaacgcaccatggcctaactatcgttgctactttcttttggaagagaaggcagccctgatttagtctgtttacagtctgcattatgtggagaatagagagccatcatagtccctaaaactttccttgccagttaacccagcaggacaacctgtctttttctcttgacaactgttaactgagaacagggcccttgctcctctaggtgtgcacattaaggactttgcacagtgtggatgtagctcatgctgctctgccgtctagtacatgctgcttgaattttcatcatcatcctccactccttccacctccaagaaaaaaaaaagcgtgcaggaagtagcatttcagatccttctccaccacctctgcttcccttctcccttcttttcctccttgcagcattccctttagtaccagggagggatggtggttgaaaatggggggaatgatgttgctcag

SEQ ID NO: 340 - DNA, 731 bp, Homo sapien
ttttttttttttgagatggagtcttgctcttttgcccaggctgcagggcactggcgtgatcttggcttactgcagcctccgcctcccaggttcaatagattctcctgcctcagactcctgagtagctgggattacaggcacctgctaccatgcctgactagtttttgtatttttagtagagacagggtttgaccatattggccaggttggtcttggactcctgacaagtgatccgccctcctcagactcccgaagtgctagggttacaaggtgtgaacgcaccatggcctaactatcgttgctactttcttttggaagagaaggcagccctgatttagtctgtttacagtctgcattatgtggagaatagagagccatcatagtccctaaaactttccttgccagttaacccagcaggacaacctgtctttttctcttgacaactgttaactgagaacagggcccttgctcctctaggtgtgcacattaaggactttgcacagtgtggatgtagctcatgctgctctgccgtctagtacatgctgcttgaattttcatcatcatcctccactccttccacctccaagaaaaaaaaaagcgtgcaggaagtagcatttcagatccttctccaccacctctgcttcccttctcccttcttttcctccttgcagcattccctttagtaccagggagggatggtggttgaaaatggggggaatgatgttgctcag

SEQ ID NO: 341 - DNA, 1700 bp, Homo sapien
agaaattattctagatcattcgttgagtggcgcgtcactctataggtaagtgaacttggtcaatagactgtgtcctatgagatcctggtgttatgacatagatgcttggatgctcatcttattaaaataagcccggagggaccatgctgagcgtacttgatgcttaattcctacgcatggacgttctggaggtcatatatcgtcgcttctaatctatcaggagtccaacgccggaactcataatattacagattgtgactgctcccgctcgcgtggttagttgttcctatgtgtggcttggagccatggccacttggcttcctagattgtgtcccatgaattcaagcataaggagctcccagtctgctgcacctggcctcccttgtccttcacatccctgcagcatactgtagcaaactttcaagttagctttttattgcattccaccccctgccagggagcaaacttaaactcatgcaactcaaaatgaccatgctgggtctgttctaagtttgaatttggaccttgatccagccttcacatactttctcttatgaattcctcttaatgctagttaataaaaatataatggctttcatgtcccttctcataataacattgccagctttgggggttctttgaaaactttgcttgagaagtccatggcaaaaaaaaaacaaagatatttggctttaaaatatggtctttgcttaccaaactcctctctctgaggaagggagagaaagagttgaaggtttctgggaaaggggcatagaagcaactcttaactctggccatgtggatctgcagacaaaattagggcaaatgtagtgctacagatcccatccccgggcctcacattgtggccagccatatggagtcagatttggagactttttggagatggggaagccactggactcttaggcatctggtgtaaagagagactttttctttgctactttttttttttttttttgagatggagtcttgctcttttgcccaggctgcagggcactggcgtgatcttggcttactgcagcctccgcctcccaggttcaatagattctcctgcctcagactcctgagtagctgggattacaggcacctgctaccatgcctgactagtttttgtatttttagtagagacagggtttgaccatattggccaggttggtcttggactcctgacaagtgatccgccctcctcagactcccgaagtgctagggttacaggtgtgaaccaccatgcctaactatcgttgctactttctattggaagagaaggcagccctgatttagtctgtttacagtctgcattatgtggagaatagagagccatcatagtccctaaaactttccttgccagttaacccagcaggacaacctgtctttttctcttgacaactgttaactgagaacagggcccttgctcctctaggtgtgcacattaaggactttgcacagtgtggatgtagctcatgctgctctgccgtctagtacatgctgcttgaattttcatcatcatcctccactccttccacctccaagaaaaaaaaaagcgtgcaggaagtagcatttcagatccttctccaccacctctgcttcccttctcccttcttttcctccttgcagcattccctttagtaccagggagggatggtggttgaaaatggggggaatgatgttgctcagaaaaa

SEQ ID NO: 342 - DNA, 2046 bp, Homo sapien
gtgcaattcagtggtagtaaatacagtcataatgtgcaatcatcaccatctatctgcactatctactatatttacaaactatatttatttctgcaacaactttgtgcaagaagaaaatggtgtcagctgtacatagtaaagccatgctagctattaatgatcactacttcaacttatagacactttcacaccatcccttaagaatccatagtaatctctacagtttggggagtgtacttgctcgttttttgacaatcatatcataacattgtcttattcttctggcatcattcccattttccacaacttttcaaatgttattttcagtgattttaggtaaacgttctattggtactccagaacaattttagcctgaggcagaaaactggaacacacttggatcatatcacagctattctctgactttctttattcacttttggatttgcaatatttacctatttttgttcctccgttttcaaatggtggctcatctgcattgttagagaaaacaaaaaataaagtgagatggctctgtctttgtcatttcttattatctcttggctccaagaagagcttttagccctgccttggtcttagttgatcaattattagtgtgacgtcaagtttttattttaacagcagtaatcttttataagagttttaagtattataaccttgtttgtgggattactatgtggtgaaaattggagacttcctgtactttaactttttaagaaataaaagagaaactttatggggatatattgatggtaaattgtagtcactagtgcataatattggaagtttagaaaatgaatggtatgtgccaatagcaatcctaggctaacatttcacattcaaattaattgaagcaggcacactttgatttggagtatgttcttttctttttatggtgataatgcctgccagaactttggtctcaaacttaagttcatttctttcaggccagtttcatctgatggaatcagctttactgtctgaagtaggcagacagtagcaggaaagaaaacaccatcaaataatagtgtactacctgtgaggcacttctttctaaaactttaacttcttacttttggaaaagacttgaatgtcttattcctggaaaggaatactatgcttgataaacctaagaagagtttctgggaagttaggatgaggatcaccctaaatttgcactgtggagtgtaaatttcattcaaatacccgcctattttgattctgtgtaagaaagttggtgggccagttcattttcttttggcattatctgtttttggcaggcccagcagtatagctgctaattctactttgacataacacacatcctttattttcttctccaagcctacttctcttctgttcattcaccctatcttgtaggcttaaaatcttgctgggttttcattcttccctcctgtgtgccaacattcaggtgatatccagtcctgagatgtgctccatattattttctttctagtcactagaaactttcgtttgggccttcatttatttttgctggtattaaccttcaacttggattcatatctctgccctgtagttgtgtggccttgaatcacctctttgatccactgtttgtgcatcttagaaatgttgacagtaatattacctcttcataggttgctggaagcgttaagtgagcacagtatgcagactagtaaagattcattgtttgtatcattacctctgccaccataactactacaattgccaacaccttgccaccccatactgcagatccaacctgatgagccatctaatccagcaggggctctaatcagcctcgaaaactgattctaactccttagttaggcacaaatgcccttctcactctcagctccactgacagccacatccctgactacattgaactgttccctatgtctgtatcttgcatgttaactgaaaaatcctatactgaccagcttctacgtttttcctcaagatcatgtcaaaacctctattagcttcctagtatccattcctcctactcctttatatttgtgt

SEQ ID NO: 343 - DNA, 2048 bp, Homo sapien
gtgcaattcagtggtagtaaatacagtcataatgtgcaatcatcaccatctatctgcactatctactatatttacaaactatatttatttctgcaacaactttgtgcaagaagaaaatggtgtcagctgtacatagtaaagccatgctagctattaatgatcactacttcaacttatagacactttcacaccatcccttaagaatccatagtaatctctacagtttggggagtgtacttgctcgttttttgacaatcatatcataacattgtcttattcttctggcatcattcccattttccacaacttttcaaatgttattttcagtgattttaggtaaacgttctattggtactccagaacaattttagcctgaggcagaaaactggaacacacttggatcatatcacagctattctctgactttctttattcacttttggatttgcaatatttacctatttttgttcctccgttttcaaatggtggctcatctgcattgttagagaaaacaaaaaataaagtgagatggctctgtctttgtcatttcttattatctcttggctccaagaagagcttttagccctgccttggtcttagttgatcaattattagtgtgacgtcaagtttttattttaacagcagtaatcttttataagagttttaagtattataaccttgtttgtgggattactatgtggtgaaaattggagacttcctgtactttaactttttaagaaataaaagagaaactttatggggatatattgatggtaaattgtagtcactagtgcataatattggaagtttagaaaatgaatggtatgtgccaatagcaatcctaggctaacatttcacattcaaattaattgaagcaggcacactttgatttggagtatgttcttttctttttatggtgataatgcctgccagaactttggtctcaaacttaagttcatttctttcaggccagtttcatctgatggaatcagctttactgtctgaagtaggcagacagtagcaggaaagaaaacaccatcaaataatagtgtactacctgtgaggcacttctttctaaaactttaacttcttacttttggaaaagacttgaatgtcttattcctggaaaggaatactatgcttgataaacctaagaagagtttctgggaagttaggatgaggatcaccctaaatttgcactgtggagtgtaaatttcattcaaatacccgcctattttgattctgtgtaagaaagttggtgggccagttcattttcttttggcattatctgtttttggcaggcccagcagtatagctgctaattctactttgacataacacacatcctttattttcttctccaagcctacttctcttctgttcattcaccctatcttgtaggcttaaaatcttgctgggttttcattcttccctcctgtgtgccaacattcaggtgatatccagtcctgagatgtgctccatattattttctttctagtcactagaaactttcgtttgggccttcatttatttttgctggtattaaccttcaacttggattcatatctctgccctgtagttgtgtggccttgaatcacctctttgatccactgtttgtgcatcttagaaatgttgacagtaatattacctcttcataggttgctggaagcgttaagtgagcacagtatgcagactagtaaagattcattgtttgtatcattacctctgccaccataactactacaattgccaacaccttgccaccccatactgcagatccaacctgatgagccatctaatccagcaggggctctaatcagcctcgaaaactgattctaactccttagttaggcacaaatgcccttctcactctcagctccactgacagccacatccctgactacattgaactgttccctatgtctgtatctttgcattgttaactgaaaaatcctatactgaccagcttctacgtttttcctcaagatcatgtcaaaacctctattagcttcctagtatccattcctcctactcctttatatttgtgt

SEQ ID NO: 344 - DNA, 599 bp, Homo sapien
ctgcattggaacagaatacagcctaggtggttcagaatatgaattctaagaattttgtggaaatgtttaagaaatcctgacagaatgggatcttttataaattcacatttctcattccatccatcctgaatagtgaaatcactgatttggcttttctcaatctgtaacatcccaaatcccaataagtattgccttgttcatcaacacaaagtttgcacatacttcgtgcaaaatttagttctgttactaaatcgaactcatgagaagttttaatccagaatctcaaagttcctaatatgctatcagagaagatttcgtaccctaatagaaacaaattattcattattcatatgtgcttgaaagtactaattgtgagtgctttgaagagaaattatcaaaaatatgtggactgtttaagtcagacaaccaaagaaaaaacatagttttgtgatttgccaaatttggcccattcgtttaaggcagcccaggaatagatttaaacacatacacacacgagccagctgaaattaatgtactatatatgtatatatttaatgggctgatttctggacctcttataggattcccaagaagataag

SEQ ID NO: 345 - DNA, 598 bp, Homo sapien
ctgcattggaacagaatacagcctaggtggttcagaatatgaattctaagaatttgtggaaatgtttaagaaatcctgacagaatgggatcttttataaattcacatttctcattccatccatcctgaatagtgaaatcactgatttggcttttctcaatctgtaacatcccaaatcccaataagtattgccttgttcatcaacacaaagtttgcacatacttcgtgcaaaatttagttctgttactaaatcgaactcatgagaagttttaatccagaatctcaaagttcctaatatgctatcagagaagatttcgtaccctaatagaaacaaattattcattattcatatgtgcttgaaagtactaattgtgagtgctttgaagagaaattatcaaaaatatgtggactgtttaagtcagacaaccaaagaaaaaacatagttttgtgatttgccaaatttggcccattcgtttaaggcagcccaggaatagatttaaacacatacacacacgagccagctgaaattaatgtatatatatgtatatatttaatgggctgatttctggaccctcttataggattcccaagaagataag

SEQ ID NO: 346 - DNA, 881 bp, Homo sapien
tagagcataaaacgaaaggtggggcccctctgaaggtggggcctgtgtgactgctcggctgtgggtctagactgacctgggctttggagcccttcccttccacctcctcagcagcttcctggaagcctctgtcctcttgttggttctgtctgcctctcacagtcatccatcttatcccattgggttttaaatatgcccaaatgtctccaattgagaaatgcttccatttcctcccttctgctctgccacagtgtccttgggtctgtaaaggttctcaccgagggccccagtgacctcacattgctttatttcatgcccatttttcagaacccttttcttgccactgctgcccacttttgcccctggaaatggctggagccttgtttcccaggacgtcattctctctgggtttttgtcttgcctctggctactccctctggttttatttgatcattattccatagtttttagttattattctgctttaactctatttggagaaaaattttagtctttttttcattctaaatatttttctggaaatggtagaatagtacattttgcctttagaatcttcacctttctttcaaccagtaccctcttcttgtcttaggtcaaagggtacaaagatgcagttatttgggtgagtaagtctcaagatctaatgtacaccataaggagtgcagtatcatattgtgcactgggagtagatttaggaattctcagcacacacagaataaaggacggtaactgtgtgagatgctggacatgtaatttacttgactgtagtaatcacttcactatgtgtatgtagatcagagcatcatgctgtacacctcatacaataaatccctctcccaaatcaaaaatcctcaagtagg

SEQ ID NO: 347 - DNA, 1183 bp, Homo sapien
  misc_feature (212)..(294): n=a, c, g or t
ggtgaagtctaccagatacctccatgttagatgaagtgctaacctctttccccttgtctgtcctctggctcattcacagcagacagctctctctcagctttgcagggaaagaagccagcagatggcattgactctgcttctctatcccccttctgccaccgtggtagcagagctaccctttcctgggctgagtccagcctctccctggggcnnnnnnnnnnnnnnnnnnnnnnnnnnnnnnnnnnnnnnnnnnnnnnnnnnnnnnnnnnnnnnnnnnnnnnnnnnnnnnnnnnntggtgacatagagcataaaacgaaaggtggggcccctctgaaggtggggcctgtgtgactgctcggctgtgggtctagactgacctgggctttggagcccttcccttccacctcctcagcagcttcctggaagcctctgtcctcttgttggttctgtctgcctctcacagtcatccatcttatcccattgggttttaaatatgcccaaatgtctccaattgagaaatgcttccatttcctcccttctgctctgccacagtgtccttgggtctgtaaaggttctcaccgagggccccagtgacctcacattgctttatttcatgcccatttttcagaacccttttcttgccactgctgcccacttttgcccctggaaatggctggagccttgtttcccaggacgtcattctctctgggtttttgtcttgcctctggctactccctctggttttatttgatcattattccatagtttttagttattattctgctttaactctatttggagaaaaattttagtctttttttcattctaaatatttttctggaaatggtagaatagtacattttgcctttagaatcttcacctttctttcaaccagtaccctcttcttgtcttaggtcaaagggtacaaagatgcagttatttgggtgagtaagtctcaagatctaatgtacaccataaggagtgcagtatcatattgtgcactgggagtagatttaggaattctcagcacacacagaataaaggacggtaactgtgtgagatgctggacatgtaatttacttgactgtagtaatcacttcactatgtgtatgtagatcagagcatcatgctgtacacctcatacaataaatccctctcccaaatcaaaaatcctcaagtagg

SEQ ID NO: 348 - DNA, 883 bp, Homo sapien
tagagcataaaacgaaaggtggggcccctctgaagatggggcctgtgtgactgctcggctgtgggtctagactgacctgggctttggagcccttcccttccacctcctcagcagcttcctggaagcctctgtcctcttgttggttctgtctgcctctcacagtcatccatcttatcccattgggttttaaatatgcccaaatgtctccaattgagaaatgcttccatttcctcccttctgctctgccacagtgtccttgggtctgtaaaggttctcaccgagggccccagtgacctcacattgctttatttcatgcccatttttcagaacacttttcttgccactgctgcccacttttgcccctggaaatggctggagccttgtttcccaggacgtcattctctctgggtttttgtcttgcctctggctactccctctggttttatttgatcattattccatagtttttagttattattctgctttaactctatttggagaaaaattttagtctttttttcattctaaatatttttctggaaatggtagaatagtacattttgcctttagaatcttcacctttctttcaaccagtaccctcttcttgtttaggtcaaagggtacaaagatgcagttattttgggtgagtaagtctcaagatctaatgtacaccataaggagtgcagtatcatattgtgcactgggagtagatttaggaattctcagcacacacagaataaaggacggtaactgtgtgagatgctggacatgtaatttacttgactgtagtaatcacttcactatgtgtatgtagatcagagcatcatgctgtacaccttatacaataaatccctctccccaaatcaaaaaatcctcaagtagg

SEQ ID NO: 349 - DNA, 472 bp, Homo sapien
cccacagagacttgaaggcagctacataatcatgactcttttggttgcaagtaacagaatccaaattcaatgtggtttatgcctaaaagagaattgattggctctggaaagatccaagagctagctctagggccttcaggcatggctggatccagaagcataatcagtgttgtcagtctccctctctcctagctgaaaagtgaaggaggaagcactgagtgggtgccaggataaggaggtgagagtaggcatgccaaagttccttgtccctgctggctcagttcccgaacctgtatagtgggactgtcaggttcaaggagagggacattggttgcaggactcacagggttgcaaggacttttgatcattttttcaggctgtctgctgggtgggaagacacccaggctgagatcacagcaaaggcgtgacctacgacaggaattctttctgtggtatcccatttgaatgggcc

SEQ ID NO: 350 - DNA, 475 bp, Homo sapien
cccacagagacttgaaggcagctacataatcatgactcttttggttgcaagtaacagaatccaaattcaatgtggtttatgcctaaaagagaattgattggctctggaaagatccaagagctagctctagggccttcaggcatggctggatccagaagcataatcagtgttgtcagtctccctctctcctagctgaaaagtgaaggaggaagcactgagtgggtgccaggataaggaggtgagagtaggcatgccaaagttccttgtccctgctggctcagttcccgaacctgtatagtgggactgtcaggttcaaggagagggacattggttgcaggactcacagggttgcaaggacttttgatcattttttcaggctgtctgctgggtgggaagacacccaggctgagatcacagcaaaggcgtgacctacgacaggaattctttctgtggtatcccatttgaatgggcctga

SEQ ID NO: 351 - DNA, 363 bp, Homo sapien
tctttctccattgaattgccattgtacctttaccaagaatcaattggttatatttgtgtaagtcgatttctccatgacttcctccttccctggggttcccctttttacttttccagccacagagatgagacattagaataggacgtacttcctgtgactgcttgcatttcgggccaagaggcagaaagacagaggaaaaaagcagcagatgtttgctcctacatcttgagatcagagctcctctgatcagagaggaaggttcctttccctcagagtatatgtgactgttgtccccgctgtccaccaccaccttggaattgccttggattgggaagcaagagaattaaaaacaataaaaaaagg

SEQ ID NO: 352 - DNA, 817 bp, Homo sapien
agtacagtgggggtgatttccaagaactctttgactaactaaaggttataaagattttatgttttctcttaaaagttttatagttttacatttagatatatatgatttattttgaattaatatttctgtaagatctgttttaggtcaggtttccttttttagatatggatgtctaattattccagcacctttgttgaaaacacaatctttctccattgaattgccattgtacctttaccaagaatcaattggttatatttgtgtaagtcgatttctccatgacttcctccttccctggggttcccctttttacttttccagccacagagatgagacattagaataggacgtacttcctgtgactgcttgcatttcgggccaagaggcagaaagacagaggaaaaaagcagcagatgtttgctcctacatcttgagatcagagctcctctgatcagagaggaaggttcctttccctcagagtatatgtgactgttgtccccgctgtccaccaccaccttggaattgccttggattgggaagcaagagaattaaaaagaaaaaaaaaaggaaagaaaaatggagtgtttcccccattttctccaggtttaggaattcccttttctgctcctctagctaaaactcagtttgttccctctgtccacatcctggtatgccatgtctagctgccttgagtccaggctggtgatttcttacgaaaaaagtgggacgctcattgccagtttggtagtaccttgagattcattcttcttccctaatcagcctgctatcgtttacttttcagacccctcaaatagct

SEQ ID NO: 353 - DNA, 651 bp, Homo sapien
cttcttgagggaagagtatatatctccatttcactgatgtcagactccttcatgtcacttctcctgcaatgaaatgtgagtggaagtgatgtgtcacttccgggtggaagctttcagagacatcatttggtttgtctcattctctttttctctgccacaaagaccacagagtattgatatggagactgtgccatcaagatagtatgtagcagatgtgtaacatgagtgagggaaagcgggtgtgttgttttggggattatttgttactacagcattaccttggttgagtagactgataaatatgttgatatttaattgcatagagcaatcaactgcaacagaaaaagtctatcttaagagctaaaagctctttcttccatctgaatgaagcacagaaattaagtttcttataaaaataactaataaaacttctaatttcatcatcgaccatatgactgaatcattgttcctctctattgtttaaaattaaaagtctttctccatatggtttacatttgtgtttgtgcttggcattggatcacctacctgacccctctaacttttccttcattacagcagagccatcccactggtcaggggacataatacatagcccagatctttagtttattgtctacacttaccaaagtc

SEQ ID NO: 354 - DNA, 651 bp, Homo sapien; identical to SEQ ID NO: 353

SEQ ID NO: 355 - DNA, 487 bp, Homo sapien
  misc_feature (410)..(410): n=a, c, g or t
  misc_feature (424)..(424): n=a, c, g or t
  misc_feature (432)..(432): n=a, c, g or t
  misc_feature (442)..(442): n=a, c, g or t
aaataattttgaattagaatggatagaagagaaggatgcagaattcttgtattaactttccatacttattaatgaaattttaccttgttgaaggacataacatctcacacaaaaggagatggaaatagcagaccagaaaagtgttgatccttgctagccatctactagactaaatgcaaatgaagggaagctaatgaatcaatacactggtgctggaaactgacacagacaatgtgacttaataaaaccctttagaggaaccaaatgagacagtgtacaaaagcgtcacacagttctgaaacttttaagttcagctttctctggtataaacaaaaaggagaagggacatacaaaaatgaaggaaagcttcttgtgagataagatttttaatcattattgcaacatttgantttttaaatttatnttttcacntttttttaanatataaaaaccaaggccttatatgttgccagactgggcttgaact

SEQ ID NO: 356 - DNA, 407 bp, Homo sapien
aaataattttgaattagaatggatagaagagaaggatgcagaattcttgtattaactttccatacttattaatgaaattttaccttgttgaaggacataacatctcacacaaaaggagatggaaatagcagaccagaaaagtgttgatccttgctagccatctactagactaaatgcaaatgaagggaagctaatgaatcaatacactggtgctggaaactgacacagacaatgtgacttaataaaaccctttagaggaaccaaatgagacagtgtacaaaagcgtcacacagttctgaaacttttaagttcagctttctctggtataaacaaaaaggagaagggacatacaaaaatgaaggaaagcttcttgtgagataagatttttaatcattatttgcaacatt

SEQ ID NO: 357 - DNA, 797 bp, Homo sapien
  misc_feature (143)..(143): n=a, c, g or t
  misc_feature (148)..(148): n=a, c, g or t
  misc_feature (158)..(158): n=a, c, g or t
  misc_feature (163)..(163): n=a, c, g or t
  misc_feature (166)..(166): n=a, c, g or t
  misc_feature (170)..(170): n=a, c, g or t
  misc_feature (189)..(189): n=a, c, g or t
  misc_feature (194)..(194): n=a, c, g or t
  misc_feature (197)..(197): n=a, c, g or t
  misc_feature (204)..(204): n=a, c, g or t
  misc_feature (227)..(227): n=a, c, g or t
  misc_feature (295)..(295): n=a, c, g or t
  misc_feature (368)..(496): n=a, c, g or t
atacacccaagagaactgaaagtgttcacatgcaaacttgtacacagattgttcacagtagtattgttcatagtagccaaaaaaacacccaaatgttgaataaattgctgaataaacaaatcatggcatacccatgcaatggnatatntggccattanaaggnatnaagnactgacgcatgctacagcntggangtntcttganaacatcatgctaggtgagagaantcgaacatgatacagcaactccatttatatcaaatgtccaggacaggcaaatctacagaaacagaaangccgtacggctggggaaaatggatacactgggagtgagagctaaagatatgacatttattttcagggtgatgnnnnnnnnnnnnnnnnnnnnnnnnnnnnnnnnnnnnnnnnnnnnnnnnnnnnnnnnnnnnnnnnnnnnnnnnnnnnnnnnnnnnnnnnnnnnnnnnnnnnnnnnnnnnnnnnnnnnnnnnnnnnnnnnngctacaaaataacaattatcggggatgacagggaaggttccccatattttaaaaagtttggaacttattcgtaaaccatttcactgaaaataaatcaaaggcaaaattcagctgtgattcaacaagcttccacaagatggcagcaaagctttggaaagctacccttactttttccaactttgcccaaaacgaattttgtgcagtggcacatgtaagaatccactcaaactgaacaggaggaaaattgcaaaccgtgaatggtacctggggcagtcaggatggaaatggatttcccagaata

SEQ ID NO: 358 - DNA, 871 bp, Homo sapien
cactttagtaaacagtctggcagtttttaaaaaagttaaagttaccatttgactcagaaatctcacttctacatatacacccaagagaactgaaagtgttcacatgcaaacttgtacacagattgttcacagtagtattgttcatagtagccaaaaaaacacccaaatgttgaataaattgctgaataaacaaatcatggcatacccatgcaatggaatatttggccattaaaaggaatgaagcactgacgcatgctacagcatggatgtgtcttgaaaacatcatgctaggtgagagaagtcgaacatgatacagcaactccatttatatcaaatgtccaggacaggcaaatctacagaaacagaaagctgcctacggctggggaaaatggatacactgggagtgagagctaaagatatgacatttattttcagggtgatgaaatggtctaaaattgattgtggtgatcgctgcacaactctgaatatacaaaaaaaagaaaaacccattgaattgtacgctttaaacgggtgacttgcatggtgcgtgaaatatatctcaataaagctgctacaaaataacaattatcggggatgacagggaaggttccccatattttaaaaagtttggaacttattcgtaaaccatttcactgaaaataaatcaaaggcaaaattcagctgtgattcaacaagcttccacaagatggcagcaaagctttggaaagctacccttactttttccaactttgcccaaaacgaattttgtgcagtggcacatgtaagaatccactcaaactgaacaggaggaaaattgcaaaccgtgaatggtacctggggcagtcaggatggaaatggatttcccagaata

SEQ ID NO: 359 - DNA, 330 bp, Homo sapien
tgctgaggcttgctttacactggtggaatctgaaaggattgaaccctcagagcgctgcagtgcgtagagctttctaggaactggggtacattcagggaaagggaataaggagtggatcctcgacttgagagaagaaccacaaaagaaccagttgagggttcagaagggggcgtgactgggtgtggcagatgtggagctgggttggtgagagcaggatgaggggctgttgctggctcctgagtgtagggtaggcccgtaagttgcactccactcaggggctgagaacctgtgtgcatagcaaggcacacaagacattcacttttttttttt

SEQ ID NO: 360 - DNA, 636 bp, Homo sapien
aggcaagatgtaaccatcaagagctgaacattgggatggagcacagggcaggaggggaaagggatggaagggaggcttgagtctgctgctgcaggagagctgggaggggactcgccagcaggtttggaaaggaaaggggtgctgaggcttgctttacactggtggaatctgaaaggattgaaccctcagagcgctgcagtgcgtagagctttctaggaactggggtacattcagggaaagggaataaggagtggatcctcgacttgagagaagaaccacaaaagaaccagttgagggttcagaagggggcgtgactgggtgtggcagatgtggagctgggttggtgagagcaggatgaggggctgttgctggctcctgagtgtagggtaggcccgtaagttgcactccactcaggggctgagaacctgtgtgcatagcaaggcacacaagacattcacttttttttttttcttaagagacagagtctcactgttgcccaggctgacatacagtggctcgctgctgccttcaactcctgggctcaaccagtcctcctgtcttagcctctggagtagctaggactacaggtatgcaccaccatgccaatttttttaaaaaatattttgaggccgggcg

SEQ ID NO: 361 - DNA, 479 bp, Homo sapien
ttgtcttgtgtgcctttgcctatgcacacaggtttctcagccccttgagttggagtgcaactttacgggccatacccttacacctcaggagccagcaacagccccttcattccttgctctcaccaacccagctccacattcttgccacacccagttcacgccccctttcttgaaccctcaactggttctttgtgctggtctcttctctcaagttcgaggattccactcctttattcccttttccctgaattgtaccccagtttcctagaaagctctacgcactgcagcgctctgaggggttcaatcctttcagattccaccagtgtaaagcaagcctcagcacccctttcctttccaaacctgctggcaggtccctcccagctctcctgcagcacagactcaagcctcccttccatccctttcccctcctgccctgtgctccatcccaatgttcagctcttgatggttacatcttgcct

SEQ ID NO: 362 - DNA, 402 bp, Homo sapien
tggaagggaggcttgagtctgtgctgcaggagagctgggagggactgccagcaggtttggaaaggaaaggggtgctgaggcttgctttacactggtggaatctgaaaggattgaaccctcagagcgctgcagtgcgtagagctttctaggaactggggtacattcagggaaagggaataaggagtggatcctcgacttgagagaagaaccacaaaagaaccagttgagggttcagaagggggcgtgactgggtgtggcagatgtggagctgggttggtgagagcaggatgaggggctgttgctggctcctgagtgtagggtaggcccgtaagttgcactccactcaggggctgagaacctgtgtgcatagcaaggcacacaagacattcacttttttttttt

SEQ ID NO: 363 - DNA, 2080 bp, Homo sapien
gtctactgcattttctttgttatgcaaactgcagctaactgcaacttccaggattcatccttggagtgaaagcagctacagatcagccagtctaaacattgtcatcatagggtgagggtggggaggcatcaaaatcaactagggagaattttaaaccatatgcctgagccccaccctaggaaatggtaacctgatctgctaggttgcatgtgagtcctgggaaatcctttttaagttccgtgggtgactttgccatacacccctgcttgagaaccacttctggggctcattccccttatcttcaacactctgagaaaccaaggctgtgccggtccaggacttaaacccaagtgtttggcttctgttgcaggcctctttgtgcagcgccttgctgacgcccagggttctgatgtagaagcctacaccaggcctgaggttgtgaaactcatggcagtccacgcctgagaagagaaggcctgaaagagaaggaagagcccatgggacttgccacggttttgacttacatctgcaactccaaggctacaggcaggaagtaagaacagtgctcaagtggcagcagatactgactatggcttcatttcacagcttcacacagcagagtagcagaaaacaaagaatgtaagattggacccagttgctgctgttcaccaactctgtgatcttcaaaaagccatatagcttctccagacctgttaatcagggaagaagcagataactgaaggctggctttgagaagtttcgaggtaacataggaacctgctcatgcaggcactctttccatctgacttgggccaaggtgctccgtgattgacaagcagccagcctctgggagagcactctgatcagatcattgatagaacattcactactctacttatcatacccatttacttatctccatcttctgttagactccttaaaaacagcagcccacagcaggtgtggggataaaacagtcctgggcagtgctcattgtactcacactatgccaggcactgtgccaggaacattcaaatttctaagaatctacaaagtagatacctcattatacatcttacagagagcatcattggtgtttccaaggtcacagggctaggcaagggtggaaccctgagtctgcttgtctgtttgccccatgacagcccaggggtggtggcctcactccacctccaggcacccacaagaatataaaatcttgtacaaggatgtcgatattactattgccattcccaagtgcacctgcacctgtagtatcaggtggtttgcagccttggctgcatagctgcatatgagaatcacctgggaagcttttaaagatcccagtatccccacctcttccccagttacagtggagtcttgcgggtggtgggggacatcattatttttgaagcttccaagtaattctggtgtgcagtggggtgaccagctgtcccagggacctcctttaaaaaataatatcccgggcacatgacaggccaattgccctaatgcaaccaaggttaagaactactggtttaatgggagatattttttctgtgcttgattatactgttttattaaactctgaatccatttctttctgcaaatttttaaggcaaaaaagaaatgtgaaaatatacgtctcatttttagcaccttcagagacccggagtcatttgatgtgcttcatgacataaaattttgtaatatgccgtgtgatactaccttatttttaccatatatgtatttttaatgcttaacaagagcatatttgctctttcacatttttttttcacatacaaagttttagacatcaagcactctaaattcttttttacaaatatttttttcttaaaatgttaagaaaaagcctataatatcacttcctttgtttcctgatgtagactcagttgatgtgcacagcagtgtcaagtcaatctccaaaatactccctgtagacagggtggggagaagaccctcacttcctgccgactaatgaactcatgttgatacagacctttgcctcatcagattcatttgttaagctaaccagtgtctgcttctctggacattactggac

SEQ ID NO: 364 - DNA, 1912 bp, Homo sapien
gggggggtagggacctacagcgggcgcggcgccggcggtctgcggccggcggtgtagacgccccttcgccgggacctggcacccgaatccggcctgccgggcctctttgtgcagcgccttgctgacgcccagggttctgatgtagaagcctacaccagggcctgaggttgtgaaactcatggcagtccacgcctgagaagagaaggcctgaaagagaaggaagagcccatgggacttgccacggttttgacttacatctgcaactccaaggctacaggcaggaagtaagaacagtgctcaagtggcagcagatactgactatggcttcatttcacagcttcacacagcagggtagcagaaaacaaagaatgtaagattggacccagttgctgctgttcaccaactctgtgatcttcaaaaagccatatagcttctccagacctgttaatcagggaagaagcagataactgaaggctggctttgagaagtttcgaggtaacataggaacctgctcatgcaggcactctttccatctgacttgggccaaggtgctccgtgattgacaagcagccagcctctgggagagcactctgatcagatcattgatagaacattcactactctacttatcatacccatttacttatctccatcttctgttagactccttaaaaacagcagcccacagcaggtgtggggataaaacagtcctgggcagtgctcattgtactcacactatgccaggcactgtgccaggaacattcaaatttctaagaatctacaaagtagatacctcattatacatcttacagagagcatcattggtgtttccaaggtcacagggctaggcaagggtggaaccctgagtctgcttgtctgtttgccccatgacagcccaggggtggtggcctcactccacctccaggcacccacaagaatataaaatcttgtacaaggatgtcgatattactattgccattcccaagtgcacctgcacctgtagtatcaggtggtttgcagccttggctgcatagctgcatatgagaatcacctgggaagcttttaaagatcccagtatccccacctcttccccagttacagtggagtcttgcgggtggtgggggacatcattatttttgaagcttccaagtaattctggtgtgcagtggggtgaccagctgtcccagggacctcctttaaaaaataatatcccgggcacatgacaggccaattgccctaatgcaaccaaggttaagaactactggtttaatgggagatattttttctgtgcttgattatactgttttattaaactctgaatccatttctttctgcaaatttttaaggcaaaaaagaaatgtgaaaatatacgtctcatttttagcaccttcagagacccggagtcatttgatgtgcttcatgacataaaattttgtaatatgccgtgtgatactaccttatttttaccatatatgtatttttaatgcttaacaagagcatatttgctctttcacatttttttttcacatacaaagttttagacatcaagcactctaaattcttttttacaaatatttttttcttaaaatgttaagaaaaagcctataatatcacttcctttgtttcctgatgtagactcagttgatgtgcacagcagtgtcaagtcaatctccaaaatactccctgtagacagggtggggagaagaccctcacttcctgccgactaatgaactcatgttgatacagacctttgcctcatcagattcatttgttaagctaaccagtgtctgcttctctggacattactggactcttctacctgtgaagccatcttaaaaaaatatattgactgatttcttaacgaaacatctactctttgccaagcataaagttacctcccacttgcatacac

SEQ ID NO: 365 - DNA, 1854 bp, Homo sapien
gggggggtagggacctacagcgggcgcggcgccggcggtctgcggccggcggtgtagacgccccttcgccgggacctggcacccgaatccggcctgccgggcctctttgtgcagcgccttgctgacgcccagggttctgatgtagaagcctacaccagggcctgaggttgtgaaactcatggcagtccacgcctgagaagagaaggcctgaaagagaaggaagagcccatgggacttgccacggttttgacttacatctgcaactccaaggctacaggcaggaagtaagaacagtgctcaagtggcagcagatactgactatggcttcatttcacagcttcacacagcagggtagcagaaaacaaagaatgtaagattggacccagttgctgctgttcaccaactctgtgatcttcaaaaagccatatagcttctccagacctgttaatcagggaagaagcagataactgaaggctggctttgagaagtttcgaggtaacataggaacctgctcatgcaggcactctttccatctgacttgggccaaggtgctccgtgattgacaagcagccagcctctgggagagcactctgatcagatcattgatagaacattcactactctacttatcatacccatttacttatctccatcttctgttagactccttaaaaacagcagcccacagcaggtgtggggataaaacagtcctgggcagtgctcattgtactcacactatgccaggcactgtgccaggaacattcaaatttctaagaatctacaaagtagatacctcattatacatcttacagagagcatcattggtgtttccaaggtcacagggctaggcaagggtggaaccctgagtctgcttgtctgtttgccccatgacagcccaggggtggtggcctcactccacctccaggcacccacaagaatataaaatcttgtacaaggatgtcgatattactattgccattcccaagtgcacctgcacctgtagtatcaggtggtttgcagccttggctgcatagctgcatatgagaatcacctgggaagcttttaaagatcccagtatccccacctcttccccagttacagtggagtcttgcgggtggtgggggacatcattatttttgaagcttccaagtaattctggtgtgcagtggggtgaccagctgtcccagggacctcctttaaaaaataatatcccgggcacatgacaggccaattgccctaatgcaaccaaggttaagaactactggtttaatgggagatattttttctgtgcttgattatactgttttattaaactctgaatccatttctttctgcaaatttttaaggcaaaaaagaaatgtgaaaatatacgtctcatttttagcaccttcagagacccggagtcatttgatgtgcttcatgacataaaattttgtaatatgccgtgtgatactaccttattttttcacatacaaagttttagacatcaagcactctaaattcttttttacaaatatttttttcttaaaatgttaagaaaaagcctataatatcacttcctttgtttcctgatgtagactcagttgatgtgcacagcagtgtcaagtcaatctccaaaatactccctgtagacagggtggggagaagaccctcacttcctgccgactaatgaactcatgttgatacagacctttgcctcatcagattcatttgttaagctaaccagtgtctgcttctctggacattactggactcttctacctgtgaagccatcttaaaaaaatatattgactgatttcttaacgaaacatctactctttgccaagcataaagttacctcccacttgcatacac

SEQ ID NO: 366 - DNA, 784 bp, Homo sapien
gttttttcctctcactccgtcataagccaatacttctaatgtttacagaaataaattactaaaagaaaaatgaaaaaggaacatacaatatacatatccagattttttaacataaaatcactttatcttattaccacagttttaaaatgcttagttctcaatctttgtacttttcacaggccactaatcaacatcttcaggatctactccagaggactacaccttgattagttccagttgagaacatgtacaggaaacatatcacttgctcttactaataatttaactgatttcttgaaatcaacctgatgtttctatgaaggtggtttgagatgtggtggtccaagaccctttgctagctttaaaactctgctgattttttagaaagctttaaaaaatatgtatcaagagccataaaatgttcacgtccttgaccctgtaattatatttttaggaaactaccttaaggaaacattacttatgcacagagggagtcagtaattatacttttaggaatctattttatggaaataaaagcatgcatgcacataagtgttaattgtaggtatattgaaaataaccaaagactagaaacaatgcaaagtccctgaatgggaagaatgtagagcaaattatgttccatgctcctcagggaagctcctctttcttacataccagacaaggtcaagttcccccaacagttccctctcgtggttcatgtgtgtttccttgactaaataaacatctgtgtccccatttaatgtatttctaatacaaggcctgt

SEQ ID NO: 367 - DNA, 329 bp, Homo sapien
ctcctggctccccgtccagactctgaggacccaggagcctccatgggtacactcagaggccacactagatgcaaaaagaaccatttacagagaagtgagaggttctcaaaggctcaaccaaatgcctctgccaggagaatctttcagagtgtcctggaacattggaaataggcttaaagcttaaatgatgaatcagaagagttatgctgtattctaatgctgccactagaccactaatcaacatcttcaggatctactccagaggactacaccttgattagttccagttgagaacatgtacaggaaacatatcacttgctcttactaat

SEQ ID NO: 368 - DNA, 785 bp, Homo sapien
gttttttcctctcactccgtcataagccaatacttctaatgtttacagaaataaattactaaaagaaaaatgaaaaaggaacatacaatatacatatccagattttttaacataaaatcactttatcttattaccacagttttaaaatgcttagttctcaatctttgtacttttcacagaccactaatcaacatcttcaggatctactccagaggactacaccttgattagttccagttgagaacatgtacaggaaacatatcacttgctcttactaataatttaactgatttcttgaaatcaacctgatgtttctatgaaggtggtttgagatgtggtggtccaagaccctttgctagctttaaaactctgctgattttttagaaagctttaaaaaatatgtatcaagagccataaaatgttcacgtccttgaccctgtaattatatttttaggaaactaccttaaggaaacattacttatgcacagagggagtcagtaattatacttttaggaatctattttatggaaataaaagcatgcatgcacataagtgttaattgtaggtatattgaaaataaccaaagactagaaacaatgcaaagtccctgaatgggaagaatgtagagcaaattatgttccatgctcctcagggaagctcctctttcttacataccagacaaggtcaagttcccccaacagttccctctcgtggttcatgtgtgtttccttgactaaataaacatctgtgtaattatttaatgtatttctaatacaaggccctgt

SEQ ID NO: 369 - DNA, 835 bp, Homo sapien
ctcctggctccccgtccagactctgaggacccaggagcctccatgggtacactcagaggccacactagatgcaaaaagaaccatttacagagaagtgagaggttctcaaaggctcaaccaaatgcctctgccaggagaatctttcagagtgtcctggaacattggaaataggcttaaagcttaaatgatgaatcagaagagttatgctgtattctaatgctgccactagaccactaatcaacatcttcaggatctactccagaggactacaccttgattagttccagttgagaacatgtacaggaaacatatcacttgctcttactaataatttaactgatttcttgaaatcaacctgatgtttctatgaaggtggtttgagatgtggtggtccaagaccctttgctagctttaaaactctgctgattttttagaaagctttaaaaaatatgtatcaagagccataaaatgttcacgtccttgaccctgtaattatatttttaggaaactaccttaaggaaacattacttatgcacagagggagtcagtaattatacttttaggaatctattttatggaaataaaagcatgcatgcacataagtgttaattgtaggtatattgaaaataaccaaagactagaaacaatgcaaagtccctgaatgggaagaatgtagagcaaattatgttccatgctcctcagggaagctcctctttcttacataccagacaaggtcaagttcccccaacagttccctctcgtggttcatgtgtgtttccttgactaaataaacatctgtgtaattatttaatgtatttctaatacaaggccctgt

SEQ ID NO: 370 - DNA, 512 bp, Homo sapien
  misc_feature (138)..(172): n=a, c, g or t
gggctttgcacctatttggtagattatgtgcttgttacaaataaacatctctttaaaacaagtgtcacgatcggtattttatttctatgacaacttccattgtctagttctatattttcagtatttgagaggcagccnnnnnnnnnnnnnnnnnnnnnnnnnnnnnnnnnnnaaaattttacagtattttactaaataagagtaaatgatagtgaaaataaagctcttctatctgctcaactaaaactcagcattgacttggtccttagaagttatggtctgcaccccagtattggctgctactttttctaatgtactgaaaaaaagatctggcctcttggctttaaacagctttcatatttctttcctttcttaacttcaaatgattgttttttgatttactctagttcaagagttctcagttgggggtggttcccccctcaccccccaggaaacatttggcagtgtctggacatatttttgcttgttacacctctgggagtgggcagtgt

SEQ ID NO: 371 - DNA, 1185 bp, Homo sapien
gagtaaatgatagtgaaaataaagctcttctatctgctcaactaaaactcagcattgacttggtccttagaagttatggtctgcaccccagtattggctgctactttttctaatgtactgaaaaaaagatctggcctcttggctttaaacagctttcatatttctttcctttcttaacttcaaatgattgtcttttgatttactctagttcaagagttctcagttgggggtggttcccccctcaccccccaggaaacatttggcagtgtctggacatatttttgcttgttacacctctgggagtgggcagtgtgcttctggagggtagaggccaaggatactgctaaacatcctacagtgtccagcatagcctcctccctgcccgccagcaaaagtatccagtcccaaatagcaacactgctgaggttgagaaatcctgcacttagatagatgtgagactggcctacattagaataagcctgcattagaataattagaaattttttaagaccatggatgttggactccacctctggaaatggtgggattgagaatcttattaattttttttgagatgagtctagctctgtcgcccaggctggagtgtggtggtgccatctcggctcactgcaacctctgcctcctgggttcaagcagttctctgcctcagcctccctagtggcggggattacaggcacccgccaccatgcccggctgttttttgtatttttagtagagatggagtttcacatcttggccagggtggtcttgaactcctgacctcgtgatctacccgcctcggcctcccaaagtgctgggattacaggtgtgagctaccatgcccggccacgagaatctattttttagaagcttctcagacaatactgaaatgcagctgaattttggaaccactgttttacaccacaggtttagggactgtttgtgagttaagggttcctttcggtgatctgtgaacttggtctttgcagtacctagatcctgccttggagattatttagtagtggggattatttagatggtatacttaaccatttttcagatgcctgaagactgaactttagaagcatttgttaattgattttataaaatatcttaggacttttttttcttaacctcatgaaaatacattaccatactgtgctgaaactaagcaaaattcttaga

SEQ ID NO: 372 - DNA, 465 bp, Homo sapien
cctcttttccgctgacatctcctccctgaggatgttctggatggagttaccaagcccccgacagtctggtccagatcctcggcctcccaaagtgctgggattacaggtgtgagctaccatgcccggccacgagaatctattttttagaagcttctcagacaatactgaaatgcagctgaattttggaaccactgttttacaccacaggtttagggactgtttgtgagttaagggttcctttcggtgatctgtgaacttggtctttgcagtacctagatcctgccttggagattatttagtagtggggattatttagatggtatacttaaccatttttcagatgcctgaagactgaactttagaagcatttgttaattgattttataaaatatcttaggacttttttttcttaacctcatgaaaatacattaccatactgtgctgaaactaagcaaaattcttaga

SEQ ID NO: 373 - DNA, 224 bp, Homo sapien
gaaaatctctaagtagaattctggagggagcagagcagttgaaaacacagctcaggagcctggcctgtagggtttgcttcccagtttgccccttagtaactgtgagtttttgagaatgtccctggtctatggaagaatgagactgtcttccttacagagttgcgtgaggctccgataaattctgagtgagtcaagtgcctggagtagcagcccgcaaagaggga

SEQ ID NO: 374 - DNA, 224 bp, Homo sapien; identical to SEQ ID NO: 373

SEQ ID NO: 375 - DNA, 202 bp, Homo sapien
tagttaaggaaatcattcagaaggctgaatcatcttcatgcaaatgagttcagcataatttccttaagcatgacaatgactaaagagaaaatattcattttctttcgtaagtttctgtgtctgaaacaatttaggaaggtaaatgggggaagggtgaaattcatcattcaaaatctctttggagcatcctgtccccaggtga

SEQ ID NO: 376 - DNA, 202 bp, Homo sapien; identical to SEQ ID NO: 375

SEQ ID NO: 377 - DNA, 181 bp, Homo sapien
  misc_feature (23)..(23): n=a, c, g or t
  misc_feature (29)..(29): n=a, c, g or t
  misc_feature (46)..(46): n=a, c, g or t
tagttaaggaaatcattcagaangctgantcatcttcatgcaaatnagttcagcataatttccttaagcatgacaatggactaaagagaaaatattcatttctttcgtaagtttctgtgtctgaaacaatttagggaaggtaaatgggggaaaggtgaaattcatcattcaaaatctcttt

SEQ ID NO: 378 - DNA, 271 bp, Homo sapien
tttatatataacaactattatacatataatacaattatatatatagctaacatcaggataggctggttgaggatttatatgaatctttgctaattttgcatgtttaaaattatttcaacataaaaaaattatatgggtcatgtagttttttgtgcagtttaattctaggcaccatagtttctgttttaatgggtgtattttcttctttcatggaattgggatagtctgttgtattaaaaacctattcatttttgtacattaagattcttct

SEQ ID NO: 379 - DNA, 852 bp, Homo sapien
ccacattcttcggcataataatctctcttcagccaaatggttcaagtgacacttatgagcattccactgaagtcaggaaaattccacagtatggcccttccccatttaaggtaaatattggagcgttattcccaaatattgggataaatttggaaacacagggattgaaatggaaggacacttaaattatgactcacttagacacggtattttactctataggccaccccccgatcacctggaataagctattaaagattaaccagtaagttagagaaataatcttttttttttttgagatggagtctccctctgttgcttaggccagagtgcagtggcgcagtcttggctcactgcaacctctgcttcctgagttctagtgagtctcctcctcagcctcccaagtagctgggattacaggcatgcgccaccatgcctggctaattttttttgtatttttagtagagatggggtttcaccatgttggacatgctggtcttgaactcctgacctcaggtgatctgcctgcctcaggttcccaagtactgggattataggcttgagccattgcacctggccagaagaatcttaatgtacaaaaatgaataggtttttaatacaacagactatcccaattccatgaaagaagaaaatacacccattaaaacagaaactatggtgcctagaattaaactgcacaaaaaactacatgacccatataatttttttatgttgaaataattttaaacatgcaaaattagcaaagattcatataaatcctcaaccagcctatcctgatgttagctatatatataattgtattatatgtataatagttgttatatataaaac

SEQ ID NO: 380 - DNA, 1950 bp, Homo sapien
tatttattttattattttattatttgttttcgagatgaagaacaatcaaaggaaaatgatggacggaaattaacaatcattcttgggcggggggaaaaactccacccacaattcctaagtaaaaagggttacacacattctcggcataataagtctctctcaggccaaatgtgttcatgtgaacactatgaaggcattccagctgaggtcaggaaaataccaagtatgaccttccctatttaagttaaaatattggaagcttattccaaaatattggaataaatttgaaatacagtgattgaatggaaggacattaaattataactcattagacatgttattttactctatagacaaacacaacaaatcacctgaaataagctacaaaagataaaccagtaagttagagaaataatctttttttttttttgagatggagtctccctctgttgcttaggccagagtgcagtggcgcagtcttggctcactgcaacctctgcttcctgagttctagtgagtctcctcctcagcctcccaagtagctgggattacaggcatgtgccaccatgcctggctaattttttttgtatttttagtagagatggggtttcaccatgttggacatgctggtcttgaactcctgacctcaggtgatctgcctgcctcaggttcccaagtrctgggattataggcttgagccattgcrcctggccagaagaatcttaatgtacaaaaatgaataggtttttaatacaacagactatcccaattccttgaaagaagaaaatacacccattaaaacagaaactatggtgcctagaattaaactgcacaaaaaactacatgacccatataatttttttatgttgaaataattttaaacatgcaaaattagcaaagattcatataaatcctcaaccagcctatcctgatgttagctatatatataattgtattatatgtataatagttgttatatataaaactgtatatatacatttattgtattataatcatatatatacatttattgcattatatataatatacaactgtatatgtaattgtaatataataattatatacataatagtatatgtaatacaagtatccaaccaggaaattgatgtcaacgtatcttaccattacctaatgtgcagaccttatttgaattttgtcaatatttctcttaacgtcctctttcttctccaagatcgaattgaggatctcacattgcactcagttgttatgtccttagattcctccaggctgtgaccgtttcttattcttcccttgtcttttgtgattgtgacacttttgctgagcatggccaattattttacagaatgtttatcaatttggatttctttgatgttttctcacgattaggctgaggtcatgcatgtttgtcttctgtgttcagtcaacatgccccatcctttttgaaatatttcttcatgttctggcgtcacaatttgttccaatgttatcttatatattcctgccccagccctcgaagtaaccatttctccacagatacttcaaaatagtatttagaaaccaaggccgggcacagtggctcacgcctgtaatcccagcactttgggaggccgaggcgggctgatctcgaggtcaagagacggagaccatcctgaccaacatggtgaaactccgtctttactaaaaatacaaaaaattagccgagcgtggtggcatgcgcctgtaattccagctactcgggaggctgaggcaagagaatcgcttgaacctggaaggcagaggttgcagtgagccgagattgctccattacactccagcctgggtgacagacggagacttcatcaggtgagtttcaggagccctagcgtacaggaaggagaaacggaggcttgttggtaggacaccgccaggctgctctgtgttctgttcctcttagtcagcaaggaagga

SEQ ID NO: 381 - DNA, 943 bp, Homo sapien
tagaggtgatgatcttgagcgaggtaaactctcctcagagtcatcttccatttaaaaagattccagccaacaatctcaccctttgtaattttttaaatccctattttccaagagctgggtgggggggcttgttttctgaagaaactagagatttgcatgagctaagcttttcctaattctgtcctgcataaggggctttcttgctccccagggcagctttttttaggaatcctggggagactgggtgcaaaacagagagggacctgaaatggcttatctgaccccggcttcccagcgaggctcagagagacctgatggggctgctttggaagctttcttgcttctctatagaatctcggattctgagctggtcgcatcattaatgaggggcctcaaaaccctcaaaatctaagacgtttgtattcagttggtagctcagatagtttttctctgactcatgtggtgttgacagctaggttattcttcccttcctggtataaaagcatttcctaacattgtaaatgtaaagagctgtttacctctctccctctgtttcccactcaaccagccatgacattgcacaggaaacgggttaagttccattggccagttcactgtagggagccgggcctttccaccctccactgcttcaagtcaactgatgtgtttcctctaggagttgaaattgtcctacaggagccctggagaaattcagcacttctcaaaattctatgctgggcagatgaaggaacccattcaacttgagattactgaaaaaagacatgggactttggtgtgggatactgaggtgaagccaggtaggtgagtgggcgaggctggcatttttagacagggatccatcatgtacctctatccttggatttcaaagaagaaatcttgtttatggttctttcccagagaagaaaagaaatctattgtcagt

SEQ ID NO: 382 - DNA, 329 bp, Homo sapien
aacacagttacagccacacacagagaataacagtcacacacagtcacacacacagaataacacagtcatgaggacaccgaggcacacacggcttcagttgcttgcctggagtcacccatgcgatttgcaataccagacacacaaattggtagcacggggaagcatctgccatagacgacagattccacaaacatgaacatcagaaaccatgcctttactactttccattcacacctcttccgacacgtgagtaaaccttcccttttccatgtgatcagaatgttcacatgaaactgttctccagactgccccaaagaaaaaattgaagg

SEQ ID NO: 383 - DNA, 233 bp, Homo sapien
gacagcctcataggaacttctccctttcttctcaagtgaccaagaggaacagaacacagagcagcctggcagtgtccaagcaacaagcctccgctcctccttcctgcaccctggggctcctgaaactcacatgccccaaagtggaactcacccaaatgtctatcgtctgctgaatggataagagaatatgtgatgtctccatacggtggaatattattcagccatgaaagcaa

SEQ ID NO: 384 - DNA, 5457 bp, Homo sapien
agaaaccgacctaaggggattctcccatttggcccgtcctaccctaaagtcaccacctgctgcttttctggagcgcttaccagtgaccaagaggaacagaacacagagcagcctggcagtgtccaagcaacaagcctccgctcctccttcctgcaccctggggctcctgaaactcacatgggtaaaaaagatacagtaaagacataaataccacatttgacaaatggaaaaaaaggagtgtccagaaaagagtagcagcagtgaggaagagctgccgagacgggacagtggatccagtaggaacatagatgcatccaaactcattagactacaaggatcacggaaactgttggttgacaatagcatacgggaactgcaatacacaaaaactggaattttttttcaggctgaggcctgtgtgacaaatgatacggtatacagggagctaccctgtgtttctgagaccctttgtgacatctcacattttttccaagaagatgatgagacagaggcagagccattattgttccgtgctgttcctgagtgtcaactatctgggggggacattcccagtgtatcagaagagcaggaatcttcagagggacaagattcaggagacatttgctcagaagagaatcaaatagtttcctcttatgcttctaaagtctgttttgagatcgaagaagattataaaaatcgtcagtttctggggcctgaaggaaatgtggatgttgagttgattgataagagcacaaacagatacagcgtttggttccccactgctggctggtatctgtggtcagccacaggcctcggcttcctggtaagggatgaggtcacagtgacgattgcgtttggttcctggagtcagcacctggccctggacctgcagcaccatgaacagtggctggtgggcggccccttgtttgatgtcactgcagagccagaggaggctgtcgccgaaatccacctcccccacttcatctccctccaagcaggtgaggtggacgtctcctggtttctcgttgcccattttaagaatgaagggatggtcctggagcatccagcccgggtggagcctttctatgctgtcctggaaagccccagcttctctctgatgggcatcctgctgcggatcgccagtgggactcgcctctccatccccatcacttccaacacattgatctattatcacccccaccccgaagatattaagttccacttgtaccttgtccccagcgacgccttgctaacaaaggcgatagatgatgaggaagatcgcttccatggtgtgcgcctgcagacttcgcccccaatggaacccctgaactttggttccagttatattgtgtctaattctgctaacctgaaagtaatgcccaaggagttgaaattgtcctacaggagccctggagaaattcagcacttctcaaaattctatgctgggcagatgaaggaacccattcaacttgagattactgaaaaaagacatgggactttggtgtgggatactgaggtgaagccagtggatctccagcttgtagctgcatcagcccctcctcctttctcaggtgcagcctttgtgaaggagaaccaccggcaactccaagccaggatgggggacctgaaaggggtgctcgatgatctccaggacaatgaggttcttactgagaatgagaaggagctggtggagcaggaaaagacacggcagagcaagaatgaggccttgctgagcatggtggagaagaaaggggacctggccctggacgtgctcttcagaagcattagtgaaagggacccttacctcgtgtcctatcttagacagcagaatttgtaaaatgagtcagttaggtagtctggaagagagaatccagcgttctcattggaaatggataaacagaaatgtgatcattgatttcagtgttcaagacagaagaagactgggtaacatctatcacacaggctttcaggacagacttgtaacctggcatgtacctattgactgtatcctcatgcattttcctcaagaatgtctgaagaaggtagtaatattccttttaaattttttccaaccattgcttgatatatcactattttatccattgacatgattcttgaagacccaggataaaggacatccggataggtgtgtttatgaaggatggggcctggaaaggcaacttttcctgattaatgtgaaaaataattcctatggacactccgtttgaagtatcaccttctcataactaaaagcagaaaagctaacaaaagcttctcagctgaggacactcaaggcatacatgatgacagtcttttttttttttgtatgttaggactttaacactttatctatggctactgttattagaacaatgtaaatgtatttgctgaaagagagcacaaaaatgggagaaaatgcaaacatgagcagaaaatattttcccactggtgtgtagcctgctacaaggagttgttgggttaaatgttcatggtcaactccaaggaatactgagatgaaatgtggtaaatcaactccacagaaccaccaaaaagaaaatgagggtaattcagcttattctgagacagacattcctggcaatgtaccatacaaaaaataagccaactctgacatttggattctaccatagactctgtcattttgtagccatttcagctgtcttttgattaatgttttcgtggcacacatatttccatccttttatgtttaatctgtttaaaacaagttcctagtagacaccatctggttgagtcagttttttttatggtgtattttgaacccattctgatagtctcttttaactggaagatttcaattacttacgttaatgtaattattaatatgttaggatttatcctcagtcagccagtttgttatgtcttttctattctactgttatcacatttgtaccacttaaagtggaatctaggcactttatcaccatttagatcctattaccttttctcatctaggatatagttatcttctacataatctttctgtatcttaaaacccatcaataaattattatatattttctacttttaatcactcagaagatttaaaaaactcatgagaagagtaatctgttatgtttttccagatatttaccatttctgttgctcttccttcattattttccaaatttcgttctgcaaatttccacttcttctgatagacgttttttagttcttttagagtggttctgataggtacagattctcttattttttgcttcctctgaggacatctttttctcaccttcattctcagtgatgttttttgcttgtagtatttttagttgacattgttttctgttcagcagtttccttttagcttccgtatttcctgatgagaaatctgcagtcattcaaattgttgtttccctgtatgtagtgtgtcatttttctgtcagatttcaaggtatttatctttagtttttagccatttcattatgttggggatgagtttccttgttttattccctttggaatttgctccaattcataaatttgcagttttatgtcttttaccaaacttagaggttttcagcctaatttctaaaaatactttttattagcctgattttcatctttataggaaatagtttaagtgatgacaagttccaatagcttatatgcccagaaggccttcaaaataagaattttgaaagaatacagaaaacaaacttttatatccttctcatgtcttctactgtaaaattcatatgctttgctactctaaacctagtttgaaatcaacagtcttgagaatagatgaaaattttgatgaatagtggaattcttttaaatggaaacctcttacatgtgattttccttgccatctagaaataaaccatagtatttatgttgaatcaatcaatattatattttgtttttttcctcctcttctgagactcttattgtggaaatgttagacttttatgttttcctaaatgtccctgatattctacttatttagaacatcttttcattttttccattattctgattgggtaattttaatttgtctattttcaaatttgctggagtgttcacctgttgttgtctgtgtcgtcccactgagtgcattcaccaccttttaaattttggtcactgtatgtatcagttctaaaatttccattttgttctctatattttaaatttcttggcttatattctattttcctgcaaatgtgtcagcatttgcttgtttgagctttttttttttcaagacagggtctcaactctgttacccaggctggagtgcagtggtgcgatctcagctcactgcaacctctgcctcctggttcaagcgattattgtgcctcagcctcctgagtagctgggattacaggcatgcaccaccacagcccagctaattttttgtatttttagtagagacagagttttgctatgttggccaggctggttttgaactcctggcctcaagtgatccacccacctcagcctcccaaagtgctgggattacaggccactacacctggcacatttgagtattttttttttttttttttttttgagatggagtctcgctctgtcatctaggctggagtgcagtggtgtgatctcagctcactgcagcctctgtctcccgggctcaagcgattctcttgcctcagcctcctgagtagctaggactacaggtgcatgccaacacgcccggctaatttttttaaaaaatatttttagtagagacagggtttcaccattttggccaggatggtctcgatctcctgacctcatgatccacccgcctcggccttccaaagtgctgggattacaggcatgagccaccgtgcctggcctcatttgagtatttttataatgtctcttttaaagtctttgtcagataattccactgtacatgttattcagtgtttggtgtccactgagttgtcatttgccagacaagtggagatttttgcagctcatccttgtattctcagtagttccgatatgtaccctcgacatgtgaatgttatcttatgagactctgttttatttgtatccaacagaagatgtttattatttatttggctttctgtgaactgaggtcttaatatcagctcattttaaaagtctttgcagtggtattcggatctatcctgtgtgtgcctatgagattgggtgcagtgtatcctgttagctccattctcagggcgtttgaatgtgaattaggaccagcgcaatgaatgctcaagttggggttgggcgttagaattcataaaagtctttatatgctcagattctgcagctccatcctcttcatgattgtgatcgtaaggacagtggaattttgcagttgtctataccttatcttgaagtagaactaaattgttacatttgaagaatgtacttcataaatttacaaaaataaaaaaataggttaatgttattaaaacaaaaaggcacaca

SEQ ID NO: 385 - DNA, 4970 bp, Homo sapien
  misc_feature (111)..(111): n=a, c, g or t
cagtcagctgttattatcttacttgaccggatacactggttagaagctctatcccatttcctgaaattcagtactcttgtaggaaaatatttctccgttccaaggacgggncctcactgtcaccagccacgctcctcatccaaatccgcatccagcgctcctgagggcccacctcactcgccttggggttctccgagtgccagtccacatcccctgcagagccctctcctcctctggagtcaggtggtgggagtaccagccccacagccaaccgtggactagtactagtccacggttggctggtatctgtggtcagccacaggcctcggcttcctggtaagggatgaggtcacagtgacgattgcgtttggttcctggagtcagcacctggccctggacctgcagcaccatgaacagtggctggtgggcggccccttgtttgatgtcactgcagagccagaggaggctgtcgccgaaatccacctcccccacttcatctccctccaagcaggtgaggtggacgtctcctggtttctcgttgcccattttaagaatgaagggatggtcctggagcatccagcccgggtggagcctttctatgctgtcctggaaagccccagcttctctctgatgggcatcctgctgcggatcgccagtgggactcgcctctccatccccatcacttccaacacattgatctattatcacccccaccccgaagatattaagttccacttgtaccttgtccccagcgacgccttgctaacaaaggcgatagatgatgaggaagatcgcttccatggtgtgcgcctgcagacttcgcccccaatggaacccctgaactttggttccagttatattgtgtctaattctgctaacctgaaagtaatgcccaaggagttgaaattgtcctacaggagccctggagaaattcagcacttctcaaaattctatgctgggcagatgaaggaacccattcaacttgagattactgaaaaaagacatgggactttggtgtgggatactgaggtgaagccagtggatctccagcttgtagctgcatcagcccctcctcctttctcaggtgcagcctttgtgaaggagaaccaccggcaactccaagccaggatgggggacctgaaaggggtgctcgatgatctccaggacaatgaggttcttactgagaatgagaaggagctggtggagcaggaaaagacacggcagagcaagaatgaggccttgctgagcatggtggagaagaaaggggacctggccctggacgtgctcttcagaagcattagtgaaagggacccttacctcgtgtcctatcttagacagcagaatttgtaaaatgagtcagttaggtagtctggaagagagaatccagcgttctcattggaaatggataaacagaaatgtgatcattgatttcagtgttcaagacagaagaagactgggtaacatctatcacacaggctttcaggacagacttgtaacctggcatgtacctattgactgtatcctcatgcattttcctcaagaatgtctgaagaaggtagtaatattccttttaaattttttccaaccattgcttgatatatcactattttatccattgacatgattcttgaagacccaggataaaggacatccggataggtgtgtttatgaaggatggggcctggaaaggcaacttttcctgattaatgtgaaaaataattcctatggacactccgtttgaagtatcaccttctcataactaaaagcagaaaagctaacaaaagcttctcagctgaggacactcaaggcatacatgatgacagtcttttttttttttgtatgttaggactttaacactttatctatggctactgttattagaacaatgtaaatgtatttgctgaaagagagcacaaaaatgggagaaaatgcaaacatgagcagaaaatattttcccactggtgtgtagcctgctacaaggagttgttgggttaaatgttcatggtcaactccaaggaatactgagatgaaatgtggtaaatcaactccacagaaccaccaaaaagaaaatgagggtaattcagcttattctgagacagacattcctggcaatgtaccatacaaaaaataagccaactctgacatttggattctaccatagactctgtcattttgtagccatttcagctgtcttttgattaatgttttcgtggcacacatatttccatccttttatgtttaatctgtttaaaacaagttcctagtagacaccatctggttgagtcagttttttttatggtgtattttgaacccattctgatagtctcttttaactggaagatttcaattacttacgttaatgtaattattaatatgttaggatttatcctcagtcagccagtttgttatgtcttttctattctactgttatcacatttgtaccacttaaagtggaatctaggcactttatcaccatttagatcctattaccttttctcatctaggatatagttatcttctacataatctttctgtatcttaaaacccatcaataaattattatatattttctacttttaatcactcagaagatttaaaaaactcatgagaagagtaatctgttatgtttttccagatatttaccatttctgttgctcttccttcattattttccaaatttcgttctgcaaatttccacttcttctgatagacgttttttagttcttttagagtggttctgataggtacagattctcttattttttgcttcctctgaggacatctttttctcaccttcattctcagtgatgttttttgcttgtagtatttttagttgacattgttttctgttcagcagtttccttttagcttccgtatttcctgatgagaaatctgcagtcattcaaattgttgtttccctgtatgtagtgtgtcatttttctgtcagatttcaaggtatttatctttagtttttagccatttcattatgttggggatgagtttccttgttttattccctttggaatttgctccaattcataaatttgcagttttatgtcttttaccaaacttagaggttttcagcctaatttctaaaaatactttttattagcctgattttcatctttataggaaatagtttaagtgatgacaagttccaatagcttatatgcccagaaggccttcaaaataagaattttgaaagaatacagaaaacaaacttttatatccttctcatgtcttctactgtaaaattcatatgctttgctactctaaacctagtttgaaatcaacagtcttgagaatagatgaaaattttgatgaatagtggaattcttttaaatggaaacctcttacatgtgattttccttgccatctagaaataaaccatagtatttatgttgaatcaatcaatattatattttgtttttttcctcctcttctgagactcttattgtggaaatgttagacttttatgttttcctaaatgtccctgatattctacttatttagaacatcttttcattttttccattattctgattgggtaattttaatttgtctattttcaaatttgctggagtgttcacctgttgttgtctgtgtcgtcccactgagtgcattcaccaccttttaaattttggtcactgtatgtatcagttctaaaatttccattttgttctctatattttaaatttcttggcttatattctattttcctgcaaatgtgtcagcatttgcttgtttgagctttttttttttcaagacagggtctcaactctgttacccaggctggagtgcagtggtgcgatctcagctcactgcaacctctgcctcctggttcaagcgattattgtgcctcagcctcctgagtagctgggattacaggcatgcaccaccacagcccagctaattttttgtatttttagtagagacagagttttgctatgttggccaggctggttttgaactcctggcctcaagtgatccacccacctcagcctcccaaagtgctgggattacaggccactacacctggcacatttgagtattttttttttttttttttttttgagatggagtctcgctctgtcatctaggctggagtgcagtggtgtgatctcagctcactgcagcctctgtctcccgggctcaagcgattctcttgcctcagcctcctgagtagctaggactacaggtgcatgccaacacgcccggctaatttttttaaaaaatatttttagtagagacagggtttcaccattttggccaggatggtctcgatctcctgacctcatgatccacccgcctcggccttccaaagtgctgggattacaggcatgagccaccgtgcctggcctcatttgagtatttttataatgtctcttttaaagtctttgtcagataattccactgtacatgttattcagtgtttggtgtccactgagttgtcatttgccagacaagtggagatttttgcagctcatccttgtattctcagtagttccgatatgtaccctcgacatgtgaatgttatcttatgagactctgttttatttgtatccaacagaagatgtttattatttatttggctttctgtgaactgaggtcttaatatcagctcattttaaaagtctttgcagtggtattcggatctatcctgtgtgtgcctatgagattgggtgcagtgtatcctgttagctccattctcagggcgtttgaatgtgaattaggaccagcgcaatgaatgctcaagttggggttgggcgttagaattcataaaagtctttatatgctcagattctgcagctccatcctcttcatgattgtgatcgtaaggacagtggaattttgcagttgtctataccttatcttgaagtagaactaaattgttacatttgaagaatgtacttcataaatttacaaaaataaaaaaataggttaatgttattaaaacaaaaaggcacaca

SEQ ID NO: 386 - DNA, 4401 bp, Homo sapien
gaaatttttttaattattttccaaaatggtagctccaattagcaaatcttctatcaacttataagggtacccaaatttctgcaccatcaacagtcttggtacaatcacatccaaaaaacacgtgttttaattaactcatgtaatgttgttatttcatgtctaaaacactttgactgtaatttatgtagcactgtatgatatgtttttgtagccccatagttcctaagatattggcctgcaagttgaaagaaattggaaaaatgtgtttcttcctccgatgccttttctgaattgtcagtgagtgacccacaacttaatggggtttcctcagtgtattagtgtgcaaaacaagagccttatgacatatgtagaattaaattatttcagttggttgcatcaaagactagaaaagctaaataagggtacatgatttatctcatctcatcatataatttttccctcttttgtagtggatctccagcttgtagctgcatcagcccctcctcctttctcaggtgcagcctttgtgaaggagaaccaccggcaactccaagccaggatgggggacctgaaaggggtgctcgatgatctccaggacaatgaggttcttactgagaatgagaaggagctggtggagcaggaaaagacacggcagagcaagaatgaggccttgctgagcatggtggagaagaaaggggacctggccctggacgtgctcttcagaagcattagtgaaagggacccttacctcgtgtcctatcttagacagcagaatttgtaaaatgagtcagttaggtagtctggaagagagaatccagcgttctcattggaaatggataaacagaaatgtgatcattgatttcagtgttcaagacagaagaagactgggtaacatctatcacacaggctttcaggacagacttgtaacctggcatgtacctattgactgtatcctcatgcattttcctcaagaatgtctgaagaaggtagtaatattccttttaaattttttccaaccattgcttgatatatcactattttatccattgacatgattcttgaagacccaggataaaggacatccggataggtgtgtttatgaaggatggggcctggaaaggcaacttttcctgattaatgtgaaaaataattcctatggacactccgtttgaagtatcaccttctcataactaaaagcagaaaagctaacaaaagcttctcagctgaggacactcaaggcatacatgatgacagtcttttttttttttgtatgttaggactttaacactttatctatggctactgttattagaacaatgtaaatgtatttgctgaaagagagcacaaaaatgggagaaaatgcaaacatgagcagaaaatattttcccactggtgtgtagcctgctacaaggagttgttgggttaaatgttcatggtcaactccaaggaatactgagatgaaatgtggtaaatcaactccacagaaccaccaaaaagaaaatgagggtaattcagcttattctgagacagacattcctggcaatgtaccatacaaaaaataagccaactctgacatttggattctaccatagactctgtcattttgtagccatttcagctgtcttttgattaatgttttcgtggcacacatatttccatccttttatgtttaatctgtttaaaacaagttcctagtagacaccatctggttgagtcagttttttttatggtgtattttgaacccattctgatagtctcttttaactggaagatttcaattacttacgttaatgtaattattaatatgttaggatttatcctcagtcagccagtttgttatgtcttttctattctactgttatcacatttgtaccacttaaagtggaatctaggcactttatcaccatttagatcctattaccttttctcatctaggatatagttatcttctacataatctttctgtatcttaaaacccatcaataaattattatatattttctacttttaatcactcagaagatttaaaaaactcatgagaagagtaatctgttatgtttttccagatatttaccatttctgttgctcttccttcattattttccaaatttcgttctgcaaatttccacttcttctgatagacgttttttagttcttttagagtggttctgataggtacagattctcttattttttgcttcctctgaggacatctttttctcaccttcattctcagtgatgttttttgcttgtagtatttttagttgacattgttttctgttcagcagtttccttttagcttccgtatttcctgatgagaaatctgcagtcattcaaattgttgtttccctgtatgtagtgtgtcatttttctgtcagatttcaaggtatttatctttagtttttagccatttcattatgttggggatgagtttccttgttttattccctttggaatttgctccaattcataaatttgcagttttatgtcttttaccaaacttagaggttttcagcctaatttctaaaaatactttttattagcctgattttcatctttataggaaatagtttaagtgatgacaagttccaatagcttatatgcccagaaggccttcaaaataagaattttgaaagaatacagaaaacaaacttttatatccttctcatgtcttctactgtaaaattcatatgctttgctactctaaacctagtttgaaatcaacagtcttgagaatagatgaaaattttgatgaatagtggaattcttttaaatggaaacctcttacatgtgattttccttgccatctagaaataaaccatagtatttatgttgaatcaatcaatattatattttgtttttttcctcctcttctgagactcttattgtggaaatgttagacttttatgttttcctaaatgtccctgatattctacttatttagaacatcttttcattttttccattattctgattgggtaattttaatttgtctattttcaaatttgctggagtgttcacctgttgttgtctgtgtcgtcccactgagtgcattcaccaccttttaaattttggtcactgtatgtatcagttctaaaatttccattttgttctctatattttaaatttcttggcttatattctattttcctgcaaatgtgtcagcatttgcttgtttgagctttttttttttcaagacagggtctcaactctgttacccaggctggagtgcagtggtgcgatctcagctcactgcaacctctgcctcctggttcaagcgattattgtgcctcagcctcctgagtagctgggattacaggcatgcaccaccacagcccagctaattttttgtatttttagtagagacagagttttgctatgttggccaggctggttttgaactcctggcctcaagtgatccacccacctcagcctcccaaagtgctgggattacaggccactacacctggcacatttgagtattttttttttttttttttttttgagatggagtctcgctctgtcatctaggctggagtgcagtggtgtgatctcagctcactgcagcctctgtctcccgggctcaagcgattctcttgcctcagcctcctgagtagctaggactacaggtgcatgccaacacgcccggctaatttttttaaaaaatatttttagtagagacagggtttcaccattttggccaggatggtctcgatctcctgacctcatgatccacccgcctcggccttccaaagtgctgggattacaggcatgagccaccgtgcctggcctcatttgagtatttttataatgtctcttttaaagtctttgtcagataattccactgtacatgttattcagtgtttggtgtccactgagttgtcatttgccagacaagtggagatttttgcagctcatccttgtattctcagtagttccgatatgtaccctcgacatgtgaatgttatcttatgagactctgttttatttgtatccaacagaagatgtttattatttatttggctttctgtgaactgaggtcttaatatcagctcattttaaaagtctttgcagtggtattcggatctatcctgtgtgtgcctatgagattgggtgcagtgtatcctgttagctccattctcagggcgtttgaatgtgaattaggaccagcgcaatgaatgctcaagttggggttgggcgttagaattcataaaagtctttatatgctcagattctgcagctccatcctcttcatgattgtgatcgtaaggacagtggaattttgcagttgtctataccttatcttgaagtagaactaaattgttacatttgaagaatgtacttcataaatttacaaaaataaaaaaataggttaatgttattaaaacaaaaaggcacaca

SEQ ID NO: 387 - DNA, 3485 bp, Homo sapien
agaaaccgacctaaggggattctcccatttggcccgtcctaccctaaagtcaccacctgctgcttttctggagcgcttaccagtgaccaagaggaacagaacacagagcagcctggcagtgtccaagcaacaagcctccgctcctccttcctgcaccctggggctcctgaaactcacatgagaaggagggctgtctgagattcgagggaaacaagctctcaggacttccggtcgccatgatggctgtgggcggtaaacgcggttagtgcaagcatctgggccatcttcaatggtaaaaaagatacagtaaagacataaataccacatttgacaaatggaaaaaaaggagtgtccagaaaagagtagcagcagtgaggaagagctgccgagacgggacagtggatccagtaggaacatagatgcatccaaactcattagactacaaggatcacggaaactgttggttgacaatagcatacgggaactgcaatacacaaaaactggaattttttttcaggctgaggcctgtgtgacaaatgatacggtatacagggagctaccctgtgtttctgagaccctttgtgacatctcacattttttccaagaagatgatgagacagaggcagagccattattgttccgtgctgttcctgagtgtcaactatctgggggggacattcccaggtaagaaaagctattccgttggaaaactattggacgctgtgtctcaatatcacagaggaacatgagaattagaggaatttgggtgtttttcatcgaactcaggggagagtgaatgagcttatgcaatactagcaatgaatccagaaatttttgaaacaaaccttaagcaatgaggttttcttccatggaggtgtctagagaacctatacacaaaaaggcaatgagcaatgcaatcgaagaccagtgggttattggttaagctgttactcaatacataaaaccaacctaattctctaggaaactggctgatgatgaggctgaaggccacagtggggtcctgaggtttaacaccggggaggggagaatgcgtctatttgtagggtatgccaatttccaagggttgaatatccccatcatggcagatttcaaactaccaacgtgaagcccctgatgagggagttgaaagaacacatgcagaagtctgtcatcctgctttcaccacacagatacaagagacataaataacctcaagggcatagactgctgaaaagtgtagaaaaatgactggaaattggtatgttttaatatgtattacttttgtttttaatatgatttatttaaatgttagcttgtatcatttaatttagactaatggttgtgttgaacaacttggttgcaaaagccctgaaaatggaaccgtcagctctcatgatctgggatgcgctgtctgcagttcagcgctgggttcctcccactttctaaacccctcctcagcaggcagactccagcatgcacatgcaccaggaaagagaatataaaatggcatgtttactcttgctgctttgcctgtagctacccgaatccatagcaaaatgtgtagccgcagacagcaaccagtcttaggatgtcagcccaggggtctctccatgcttggcttgcccacagaatccttccgagaaaagcgctgtaaagcctttctcttcatcccacttctctaggtacctgttctttttaaacctaatccacgtgtcagtttctctgctggtctctttcacgtcgaaataaacagatatctcaaggaatggatcaaaggcagagaatttgatggagttggttgccttgctccagaaggtatcacctgtgttagggcaggtttctctccagaggcatgacgaaccattggctcacgctgtatgtcatagaacccatattggctaatattggaatcacctgtgaggctttgaaagcgccgatgctttggtgccacctccagacttctgattcaattgatgtgggctgtgacctggtattgggtggtttttaaagcttcccaggtgtggtcaagtttggaattaccttggaatataaatgcatacattttacgcattggtgaattactgcttcagtctttgattccgacatcgtatgataccaatcggagcaatcaatttaagccagagaatctggctgtgtccacattgaacgtgggcataatacaaagagaagaaggagagatgtcaagacacatttggctcaagggagtgtgttatctctattatttataaatgtggataaaaatatcttcattcaaaatgtcttctatttcttgatagtctagatccgcccagtctaagagaactttctgtgatgacgggagtgttccattctctgctacacagtgttatagccgtgagtgatatgtagctgttgagcacttgaaatatggatagtgcaactgagaaactaaagtttacctaagtttaattcatacaaatttaaatagcatatccgggtagcggctactctacgggacagtgcagctctagttttcaataacatcgtcttcatcttcatcaactgattcttgatgtttttcatctttttgtaacatggggatcccaacctccagtgtatcagaagagcaggaatcttcagagggacaagattcaggagacatttgctcagaagagaatcaaatagtttcctcttatgcttctaaagtctgttttgagatcgaagaagattataaaaatcgtcagtttctggggcctgaaggaaatgtggatgttgagttgattgataagagcacaaacagatacagcgtttggttccccactgctggctggtatctgtggtcagccacaggcctcggcttcctggtaagggatgaggtcacagtgacgattgcgtttggttcctggagtcagcacctggccctggacctgcagcaccatgaacagtggctggtgggcggccccttgtttgatgtcactgcagagccagaggaggctgtcgccgaaatccacctcccccacttcatctccctccaagcaggtgaggtggacgtctcctggtttctcgttgcccattttaagaatgaagggatggtcctggagcatccagcccgggtggagcctttctatgctgtcctggaaagccccagcttctctctgatgggcatcctgctgcggatcgccagtgggactcgcctctccatccccatcacttccaacacattgatctattatcacccccaccccgaagatattaagttccacttgtaccttgtccccagcgacgccttgctaacaaagacactattttagaggctgaggatacatcagtgaacaaaagaggcaaaaacatgacaaccaaagatattacatggaatgctataggaaaaatatatgtgcatatgataagaactataacaaataaagaaggttaagaaaattaatccagtggtatgtctctcaacacctacagaaatctgtccgtaatcataaccctagcaatggcgg

SEQ ID NO: 388 - DNA, 3063 bp, Homo sapien
agaaaccgacctaaggggattctcccatttggcccgtcctaccctaaagtcaccacctgctgcttttctggagcgcttaccagtgaccaagaggaacagaacacagagcagcctggcagtgtccaagcaacaagcctccgctcctccttcctgcaccctggggctcctgaaactcacatgagaaggagggctgtctgagattcgagggaaacaagctctcaggacttccggtcgccatgatggctgtgggcggtaaacgcggttagtgcaagcatctgggccatcttcaatggtaaaaaagatacagtaaagacataaataccacatttgacaaatggaaaaaaaggagtgtccagaaaagagtagcagcagtgaggaagagctgccgagacgggacagtggatccagtaggaacatagatgcatccaaactcattagactacaaggatcacggaaactgttggttgacaatagcatacgggaactgcaatacacaaaaactggaattttttttcaggctgaggcctgtgtgacaaatgatacggtatacagggagctaccctgtgtttctgagaccctttgtgacatctcacattttttccaagaagatgatgagacagaggcagagccattattgttccgtgctgttcctgagtgtcaactatctgggggggacattcccaggtaagaaaagctattccgttggaaaactattggacgctgtgtctcaatatcacagaggaacatgagaattagaggaatttgggtgtttttcatcgaactcaggggagagtgaatgagcttatgcaatactagcaatgaatccagaaatttttgaaacaaaccttaagcaatgaggttttcttccatggaggtgtctagagaacctatacacaaaaaggcaatgagcaatgcaatcgaagaccagtgggttattggttaagctgttactcaatacataaaaccaacctaattctctaggaaactggctgatgatgaggctgaaggccacagtggggtcctgaggtttaacaccggggaggggagaatgcgtctatttgtagggtatgccaatttccaagggttgaatatccccatcatggcagatttcaaactaccaacgtgaagcccctgatgagggagttgaaagaacacatgcagaagtctgtcatcctgctttcaccacacagatacaagagacataaataacctcaagggcatagactgctgaaaagtgtagaaaaatgactggaaattggtatgttttaatatgtattacttttgtttttaatatgatttatttaaatgttagcttgtatcatttaatttagactaatggttgtgttgaacaacttggttgcaaaagccctgaaaatggaaccgtcagctctcatgatctgggatgcgctgtctgcagttcagcgctgggttcctcccactttctaaacccctcctcagcaggcagactccagcatgcacatgcaccaggaaagagaatataaaatggcatgtttactcttgctgctttgcctgtagctacccgaatccatagcaaaatgtgtagccgcagacagcaaccagtcttaggatgtcagcccaggggtctctccatgcttggcttgcccacagaatccttccgagaaaagcgctgtaaagcctttctcttcatcccacttctctaggtacctgttctttttaaacctaatccacgtgtcagtttctctgctggtctctttcacgtcgaaataaacagatatctcaaggaatggatcaaaggcagagaatttgatggagttggttgccttgctccagaaggtatcacctgtgttagggcaggtttctctccagaggcatgacgaaccattggctcacgctgtatgtcatagaacccatattggctaatattggaatcacctgtgaggctttgaaagcgccgatgctttggtgccacctccagacttctgattcaattgatgtgggctgtgacctggtattgggtggtttttaaagcttcccaggtgtggtcaagtttggaattaccttggaatataaatgcatacattttacgcattggtgaattactgcttcagtctttgattccgacatcgtatgataccaatcggagcaatcaatttaagccagagaatctggctgtgtccacattgaacgtgggcataatacaaagagaagaaggagagatgtcaagacacatttggctcaagggagtgtgttatctctattatttataaatgtggataaaaatatcttcattcaaaatgtcttctatttcttgatagtctagatccgcccagtctaagagaactttctgtgatgacgggagtgttccattctctgctacacagtgttatagccgtgagtgatatgtagctgttgagcacttgaaatatggatagtgcaactgagaaactaaagtttacctaagtttaattcatacaaatttaaatagcatatccgggtagcggctactctacgggacagtgcagctctagttttcaataacatcgtcttcatcttcatcaactgattcttgatgtttttcatctttttgtaacatggggatcccaacctccagtgtatcagaagagcaggaatcttcagagggacaagattcaggagacatttgctcagaagagaatcaaatagtttcctcttatgcttctaaagtctgttttgagatcgaagaagattataaaaatcgtcagtttctggggcctgaaggaaatgtggatgttgagttgattgataagagcacaaacagatacagcgtttggttccccactgctggctggtatctgtggtcagccacaggcctcggcttcctggtaagggatgaggtcacagtgacgattgcgtttggttcctggagtcagcacctggccctggacctgcagcaccatgaacagtggctggtgggcggccccttgtttgatgtcactgcagagccagaggaggctgtcgccgaaatccacctcccccacttcatctccctccaaggtaatgtggggtgagcggaggctgtgggggccgctggggtgcgtgccg

SEQ ID NO: 389 - DNA, 1730 bp, Homo sapien
tgtatttttagtagaacagagaggagaaggttaggggtgagtcagaggaagtacgagagcaatcgctaagagataaggtcgaactttaggagccaggaaagcctccacacttgtcaccccacacatcagggctgtccaacagaactttctgcagtgatggtgttaccctatggaaggtcctgactgtgagttgttagggttcttggtgtgtggaacaaagaattgaacaaaatgcacaaacaaagcaacaaaagagcggagtaacgaaagcacagatttatggaagtgaaagtacactccacagagtcggagtgggcttgagcaagtagctcaagagcccctgactgcagtgctctttagagttttcattaagctaaaagaatttggtaacacccctaggtgccctttagaggcctccagttggttacaccctatgaaggattggcccgtgaccaatcaagaggctgaagtggagacttctgtcttgttatcacaggagtgaggatgtggcctggatgctgcccaatcttgcctagaactggctgcacctgcttgtgccttaacccttggttaccctaaatccctgttatccagactcattgggactgctctagatcttcactatccaatacgggttactgtggcaacgccaacctttgaatccccctcctgcgcgctgagcggctcgtaaccatggagaccgaagcaggtttcccgcgtccgcctcctcacacagagactgcagccccggcgcccagaccctttggacaaggagatccaagcgggccccacaatgctcagcgggtaaagagctcctccccactcctctcccgccagcagacgaaggaaacaccccgcagcctgcacatgctcagatggagctctgggcccgcgggttctactgcgcaggccctcacactcagcaaagggacttggacgcgaaagccctggtggcgctcagccggytgggagttgtagctttctggctgctacagcaggagatacaggtggccaatgggtgagctggctggaggtaggaacaaggttaaggaagctgggatcttcgtgcagactggatcgtcactatagcaacaatgaaacatcgggaagggctagttctgctaggcagtctgccattttcattctttcatctttttttttaactcaaagcttactttgcaacaggcactgttctaggcactggggatacaatggaaaacaaaatagagcttctattttggcgggagatcgacttaataactgtgaacacgtgtcactggaaaaagcagtatgttaataagtaactgggctgctttgggaaaaatggaaatgcaggcaatgttagaacactggtacacacacctaattcattcatcctcacaaagccctatagacaggtactattatgacccctcaactgtaacataggctggaaggtcacatgacaaggaagtagtggagctgggatttgaacccaggcagtctggcttcatacttgataagcttaatcacaatgccaaactggtaaatagctgtgtggcataatttcaggtagtgataagtgctgtgaaggataaagcaaagaaaggggcagggatggctctttggagagactacttagggatggctttcaggaagaggtggcatttgagcaggggcccgagggattgatgtgacttgtgataaaagaaaaacttcagacgaattaaatttaaagaagtttaattggc

SEQ ID NO: 390 - DNA, 874 bp, Homo sapien
tgttccccttcgggatggtctctcctggcctctgccctatgtggctcttccctttgctgattttattccgtgtccttctgctgtaataaactgtagccttgcctataacagcacccctgatgctttgaatgctacctgccctggaacaatggctcaatacatcctgagtgagtgaactcacgcgagggtgtgcagccatgtccaaggccacatctgtaagggtggaggtttaaggatcagactcctggatttgcctattagccgtgggacttcaggcaagtgacctctcctcaatgagccttggttccttgtctggaaaaatggagatgtctatttaacagggtcatggatgggctaaaatgagatcactcctggccaacgcatggaaggacacctggcgtgcatcagctctcagccgttcttaccgtctgtctcgatctctcagcagtattcagcacaagtctacatggctgaccccaataacaaccctggacaccaaggcccaaatgaggacaccgaggcacacacggcttcagttgcttgcctggagtcacccatgcgatttgcaataccagggctggcttaggcacacagtggacagcagtgcattttgcagagatggagaaacccacggaggaacagattttgaggatgcagatgaatgtacgggtgtcctttcagacacacaaattggtagcacggggaagcatctgccatagacgacagattccacaaacatgaacatcagaaaccatgcctttactactttccattcacacctcttccgacacgtgagtaaaccttcccttttccatgtgatcagaatgttcacatgaaactgttctccagactgccccaaagaaaaaattgaagg

SEQ ID NO: 391 - DNA, 7627 bp, Homo sapien
agaaaccgacctaaggggattctcccatttggcccgtcctaccctaaagtcaccacctgctgcttttctggagcgcttaccagtgaccaagaggaacagaacacagagcagcctggcagtgtccaagcaacaagcctccgctcctccttcctgcaccctggggctcctgaaactcacatgagaaggagggctgtctgagattcgagggaaacaagctctcaggacttccggtcgccatgatggctgtgggcggtaaacgcggttagtgcaagcatctgggccatcttcaatggtaaaaaagatacagtaaagacataaataccacatttgacaaatggaaaaaaaggagtgtccagaaaagagtagcagcagtgaggaagagctgccgagacgggacagtggatccagtaggaacatagatgcatccaaactcattagactacaaggatcacggaaactgttggttgacaatagcatacgggaactgcaatacacaaaaactggaattttttttcaggctgaggcctgtgtgacaaatgatacggtatacagggagctaccctgtgtttctgagaccctttgtgacatctcacattttttccaagaagatgatgagacagaggcagagccattattgttccgtgctgttcctgagtgtcaactatctgggggggacattcccaggtaagaaaagctattccgttggaaaactattggacgctgtgtctcaatatcacagaggaacatgagaattagaggaatttgggtgtttttcatcgaactcaggggagagtgaatgagcttatgcaatactagcaatgaatccagaaatttttgaaacaaaccttaagcaatgaggttttcttccatggaggtgtctagagaacctatacacaaaaaggcaatgagcaatgcaatcgaagaccagtgggttattggttaagctgttactcaatacataaaaccaacctaattctctaggaaactggctgatgatgaggctgaaggccacagtggggtcctgaggtttaacaccggggaggggagaatgcgtctatttgtagggtatgccaatttccaagggttgaatatccccatcatggcagatttcaaactaccaacgtgaagcccctgatgagggagttgaaagaacacatgcagaagtctgtcatcctgctttcaccacacagatacaagagacataaataacctcaagggcatagactgctgaaaagtgtagaaaaatgactggaaattggtatgttttaatatgtattacttttgtttttaatatgatttatttaaatgttagcttgtatcatttaatttagactaatggttgtgttgaacaacttggttgcaaaagccctgaaaatggaaccgtcagctctcatgatctgggatgcgctgtctgcagttcagcgctgggttcctcccactttctaaacccctcctcagcaggcagactccagcatgcacatgcaccaggaaagagaatataaaatggcatgtttactcttgctgctttgcctgtagctacccgaatccatagcaaaatgtgtagccgcagacagcaaccagtcttaggatgtcagcccaggggtctctccatgcttggcttgcccacagaatccttccgagaaaagcgctgtaaagcctttctcttcatcccacttctctaggtacctgttctttttaaacctaatccacgtgtcagtttctctgctggtctctttcacgtcgaaataaacagatatctcaaggaatggatcaaaggcagagaatttgatggagttggttgccttgctccagaaggtatcacctgtgttagggcaggtttctctccagaggcatgacgaaccattggctcacgctgtatgtcatagaacccatattggctaatattggaatcacctgtgaggctttgaaagcgccgatgctttggtgccacctccagacttctgattcaattgatgtgggctgtgacctggtattgggtggtttttaaagcttcccaggtgtggtcaagtttggaattaccttggaatataaatgcatacattttacgcattggtgaattactgcttcagtctttgattccgacatcgtatgataccaatcggagcaatcaatttaagccagagaatctggctgtgtccacattgaacgtgggcataatacaaagagaagaaggagagatgtcaagacacatttggctcaagggagtgtgttatctctattatttataaatgtggataaaaatatcttcattcaaaatgtcttctatttcttgatagtctagatccgcccagtctaagagaactttctgtgatgacgggagtgttccattctctgctacacagtgttatagccgtgagtgatatgtagctgttgagcacttgaaatatggatagtgcaactgagaaactaaagtttacctaagtttaattcatacaaatttaaatagcatatccgggtagcggctactctacgggacagtgcagctctagttttcaataacatcgtcttcatcttcatcaactgattcttgatgtttttcatctttttgtaacatggggatcccaacctccagtgtatcagaagagcaggaatcttcagagggacaagattcaggagacatttgctcagaagagaatcaaatagtttcctcttatgcttctaaagtctgttttgagatcgaagaagattataaaaatcgtcagtttctggggcctgaaggaaatgtggatgttgagttgattgataagagcacaaacagatacagcgtttggttccccactgctggctggtatctgtggtcagccacaggcctcggcttcctggtaagggatgaggtcacagtgacgattgcgtttggttcctggagtcagcacctggccctggacctgcagcaccatgaacagtggctggtgggcggccccttgtttgatgtcactgcagagccagaggaggctgtcgccgaaatccacctcccccacttcatctccctccaagcaggtgaggtggacgtctcctggtttctcgttgcccattttaagaatgaagggatggtcctggagcatccagcccgggtggagcctttctatgctgtcctggaaagccccagcttctctctgatgggcatcctgctgcggatcgccagtgggactcgcctctccatccccatcacttccaacacattgatctattatcacccccaccccgaagatattaagttccacttgtaccttgtccccagcgacgccttgctaacaaagacactattttagaggctgaggatacatcagtgaacaaaagaggcaaaaacatgacaaccaaagatattacatggaatgctataggaaaaatatatgtgcatatgataagaactataacaaataaagaaggttaagaaaattaatccagtggcgatagatgatgaggaagatcgcttccatggtgtgcgcctgcagacttcgcccccaatggaacccctgaactttggttccagttatattgtgtctaattctgctaacctgaaagtaatgcccaaggagttgaaattgtcctacaggagccctggagaaattcagcacttctcaaaattctatgctgggcagatgaaggaacccattcaacttgagattactgaaaaaagacatgggactttggtgtgggatactgaggtgaagccagtggatctccagcttgtagctgcatcagcccctcctcctttctcaggtgcagcctttgtgaaggagaaccaccggcaactccaagccaggatgggggacctgaaaggggtgctcgatgatctccaggacaatgaggttcttactgagaatgagaaggagctggtggagcaggaaaagacacggcagagcaagaatgaggccttgctgagcatggtggagaagaaaggggacctggccctggacgtgctcttcagaagcattagtgaaagggacccttacctcgtgtcctatcttagacagcagaatttgtaaaatgagtcagttaggtagtctggaagagagaatccagcgttctcattggaaatggataaacagaaatgtgatcattgatttcagtgttcaagacagaagaagactgggtaacatctatcacacaggctttcaggacagacttgtaacctggcatgtacctattgactgtatcctcatgcattttcctcaagaatgtctgaagaaggtagtaatattccttttaaattttttccaaccattgcttgatatatcactattttatccattgacatgattcttgaagacccaggataaaggacatccggataggtgtgtttatgaaggatggggcctggaaaggcaacttttcctgattaatgtgaaaaataattcctatggacactccgtttgaagtatcaccttctcataactaaaagcagaaaagctaacaaaagcttctcagctgaggacactcaaggcatacatgatgacagtcttttttttttttgtatgttaggactttaacactttatctatggctactgttattagaacaatgtaaatgtatttgctgaaagagagcacaaaaatgggagaaaatgcaaacatgagcagaaaatattttcccactggtgtgtagcctgctacaaggagttgttgggttaaatgttcatggtcaactccaaggaatactgagatgaaatgtggtaaatcaactccacagaaccaccaaaaagaaaatgagggtaattcagcttattctgagacagacattcctggcaatgtaccatacaaaaaataagccaactctgacatttggattctaccatagactctgtcattttgtagccatttcagctgtcttttgattaatgttttcgtggcacacatatttccatccttttatgtttaatctgtttaaaacaagttcctagtagacaccatctggttgagtcagttttttttatggtgtattttgaacccattctgatagtctcttttaactggaagatttcaattacttacgttaatgtaattattaatatgttaggatttatcctcagtcagccagtttgttatgtcttttctattctactgttatcacatttgtaccacttaaagtggaatctaggcactttatcaccatttagatcctattaccttttctcatctaggatatagttatcttctacataatctttctgtatcttaaaacccatcaataaattattatatattttctacttttaatcactcagaagatttaaaaaactcatgagaagagtaatctgttatgtttttccagatatttaccatttctgttgctcttccttcattattttccaaatttcgttctgcaaatttccacttcttctgatagacgttttttagttcttttagagtggttctgataggtacagattctcttattttttgcttcctctgaggacatctttttctcaccttcattctcagtgatgttttttgcttgtagtatttttagttgacattgttttctgttcagcagtttccttttagcttccgtatttcctgatgagaaatctgcagtcattcaaattgttgtttccctgtatgtagtgtgtcatttttctgtcagatttcaaggtatttatctttagtttttagccatttcattatgttggggatgagtttccttgttttattccctttggaatttgctccaattcataaatttgcagttttatgtcttttaccaaacttagaggttttcagcctaatttctaaaaatactttttattagcctgattttcatctttataggaaatagtttaagtgatgacaagttccaatagcttatatgcccagaaggccttcaaaataagaattttgaaagaatacagaaaacaaacttttatatccttctcatgtcttctactgtaaaattcatatgctttgctactctaaacctagtttgaaatcaacagtcttgagaatagatgaaaattttgatgaatagtggaattcttttaaatggaaacctcttacatgtgattttccttgccatctagaaataaaccatagtatttatgttgaatcaatcaatattatattttgtttttttcctcctcttctgagactcttattgtggaaatgttagacttttatgttttcctaaatgtccctgatattctacttatttagaacatcttttcattttttccattattctgattgggtaattttaatttgtctattttcaaatttgctggagtgttcacctgttgttgtctgtgtcgtcccactgagtgcattcaccaccttttaaattttggtcactgtatgtatcagttctaaaatttccattttgttctctatattttaaatttcttggcttatattctattttcctgcaaatgtgtcagcatttgcttgtttgagctttttttttttcaagacagggtctcaactctgttacccaggctggagtgcagtggtgcgatctcagctcactgcaacctctgcctcctggttcaagcgattattgtgcctcagcctcctgagtagctgggattacaggcatgcaccaccacagcccagctaattttttgtatttttagtagagacagagttttgctatgttggccaggctggttttgaactcctggcctcaagtgatccacccacctcagcctcccaaagtgctgggattacaggccactacacctggcacatttgagtattttttttttttttttttttttgagatggagtctcgctctgtcatctaggctggagtgcagtggtgtgatctcagctcactgcagcctctgtctcccgggctcaagcgattctcttgcctcagcctcctgagtagctaggactacaggtgcatgccaacacgcccggctaatttttttaaaaaatatttttagtagagacagggtttcaccattttggccaggatggtctcgatctcctgacctcatgatccacccgcctcggccttccaaagtgctgggattacaggcatgagccaccgtgcctggcctcatttgagtatttttataatgtctcttttaaagtctttgtcagataattccactgtacatgttattcagtgtttggtgtccactgagttgtcatttgccagacaagtggagatttttgcagctcatccttgtattctcagtagttccgatatgtaccctcgacatgtgaatgttatcttatgagactctgttttatttgtatccaacagaagatgtttattatttatttggctttctgtgaactgaggtcttaatatcagctcattttaaaagtctttgcagtggtattcggatctatcctgtgtgtgcctatgagattgggtgcagtgtatcctgttagctccattctcagggcgtttgaatgtgaattaggaccagcgcaatgaatgctcaagttggggttgggcgttagaattcataaaagtctttatatgctcagattctgcagctccatcctcttcatgattgtgatcgtaaggacagtggaattttgcagttgtctataccttatcttgaagtagaactaaattgttacatttgaagaatgtacttcataaatttacaaaaataaaaaaataggttaatgttattaaaacaaaaaggcacaca

SEQ ID NO: 392 - DNA, 5568 bp, Homo sapien
agaaaccgacctaaggggattctcccatttggcccgtcctaccctaaagtcaccacctgctgcttttctggagcgcttaccagtgaccaagaggaacagaacacagagcagcctggcagtgtccaagcaacaagcctccgctcctccttcctgcaccctggggctcctgaaactcacatgagaaggagggctgtctgagattcgagggaaacaagctctcaggacttccggtcgccatgatggctgtgggcggtaaacgcggttagtgcaagcatctgggccatcttcaatggtaaaaaagatacagtaaagacataaataccacatttgacaaatggaaaaaaaggagtgtccagaaaagagtagcagcagtgaggaagagctgccgagacgggacagtggatccagtaggaacatagatgcatccaaactcattagactacaaggatcacggaaactgttggttgacaatagcatacgggaactgcaatacacaaaaactggaattttttttcaggctgaggcctgtgtgacaaatgatacggtatacagggagctaccctgtgtttctgagaccctttgtgacatctcacattttttccaagaagatgatgagacagaggcagagccattattgttccgtgctgttcctgagtgtcaactatctgggggggacattcccagtgtatcagaagagcaggaatcttcagagggacaagattcaggagacatttgctcagaagagaatcaaatagtttcctcttatgcttctaaagtctgttttgagatcgaagaagattataaaaatcgtcagtttctggggcctgaaggaaatgtggatgttgagttgattgataagagcacaaacagatacagcgtttggttccccactgctggctggtatctgtggtcagccacaggcctcggcttcctggtaagggatgaggtcacagtgacgattgcgtttggttcctggagtcagcacctggccctggacctgcagcaccatgaacagtggctggtgggcggccccttgtttgatgtcactgcagagccagaggaggctgtcgccgaaatccacctcccccacttcatctccctccaagcaggtgaggtggacgtctcctggtttctcgttgcccattttaagaatgaagggatggtcctggagcatccagcccgggtggagcctttctatgctgtcctggaaagccccagcttctctctgatgggcatcctgctgcggatcgccagtgggactcgcctctccatccccatcacttccaacacattgatctattatcacccccaccccgaagatattaagttccacttgtaccttgtccccagcgacgccttgctaacaaaggcgatagatgatgaggaagatcgcttccatggtgtgcgcctgcagacttcgcccccaatggaacccctgaactttggttccagttatattgtgtctaattctgctaacctgaaagtaatgcccaaggagttgaaattgtcctacaggagccctggagaaattcagcacttctcaaaattctatgctgggcagatgaaggaacccattcaacttgagattactgaaaaaagacatgggactttggtgtgggatactgaggtgaagccagtggatctccagcttgtagctgcatcagcccctcctcctttctcaggtgcagcctttgtgaaggagaaccaccggcaactccaagccaggatgggggacctgaaaggggtgctcgatgatctccaggacaatgaggttcttactgagaatgagaaggagctggtggagcaggaaaagacacggcagagcaagaatgaggccttgctgagcatggtggagaagaaaggggacctggccctggacgtgctcttcagaagcattagtgaaagggacccttacctcgtgtcctatcttagacagcagaatttgtaaaatgagtcagttaggtagtctggaagagagaatccagcgttctcattggaaatggataaacagaaatgtgatcattgatttcagtgttcaagacagaagaagactgggtaacatctatcacacaggctttcaggacagacttgtaacctggcatgtacctattgactgtatcctcatgcattttcctcaagaatgtctgaagaaggtagtaatattccttttaaattttttccaaccattgcttgatatatcactattttatccattgacatgattcttgaagacccaggataaaggacatccggataggtgtgtttatgaaggatggggcctggaaaggcaacttttcctgattaatgtgaaaaataattcctatggacactccgtttgaagtatcaccttctcataactaaaagcagaaaagctaacaaaagcttctcagctgaggacactcaaggcatacatgatgacagtcttttttttttttgtatgttaggactttaacactttatctatggctactgttattagaacaatgtaaatgtatttgctgaaagagagcacaaaaatgggagaaaatgcaaacatgagcagaaaatattttcccactggtgtgtagcctgctacaaggagttgttgggttaaatgttcatggtcaactccaaggaatactgagatgaaatgtggtaaatcaactccacagaaccaccaaaaagaaaatgagggtaattcagcttattctgagacagacattcctggcaatgtaccatacaaaaaataagccaactctgacatttggattctaccatagactctgtcattttgtagccatttcagctgtcttttgattaatgttttcgtggcacacatatttccatccttttatgtttaatctgtttaaaacaagttcctagtagacaccatctggttgagtcagttttttttatggtgtattttgaacccattctgatagtctcttttaactggaagatttcaattacttacgttaatgtaattattaatatgttaggatttatcctcagtcagccagtttgttatgtcttttctattctactgttatcacatttgtaccacttaaagtggaatctaggcactttatcaccatttagatcctattaccttttctcatctaggatatagttatcttctacataatctttctgtatcttaaaacccatcaataaattattatatattttctacttttaatcactcagaagatttaaaaaactcatgagaagagtaatctgttatgtttttccagatatttaccatttctgttgctcttccttcattattttccaaatttcgttctgcaaatttccacttcttctgatagacgttttttagttcttttagagtggttctgataggtacagattctcttattttttgcttcctctgaggacatctttttctcaccttcattctcagtgatgttttttgcttgtagtatttttagttgacattgttttctgttcagcagtttccttttagcttccgtatttcctgatgagaaatctgcagtcattcaaattgttgtttccctgtatgtagtgtgtcatttttctgtcagatttcaaggtatttatctttagtttttagccatttcattatgttggggatgagtttccttgttttattccctttggaatttgctccaattcataaatttgcagttttatgtcttttaccaaacttagaggttttcagcctaatttctaaaaatactttttattagcctgattttcatctttataggaaatagtttaagtgatgacaagttccaatagcttatatgcccagaaggccttcaaaataagaattttgaaagaatacagaaaacaaacttttatatccttctcatgtcttctactgtaaaattcatatgctttgctactctaaacctagtttgaaatcaacagtcttgagaatagatgaaaattttgatgaatagtggaattcttttaaatggaaacctcttacatgtgattttccttgccatctagaaataaaccatagtatttatgttgaatcaatcaatattatattttgtttttttcctcctcttctgagactcttattgtggaaatgttagacttttatgttttcctaaatgtccctgatattctacttatttagaacatcttttcattttttccattattctgattgggtaattttaatttgtctattttcaaatttgctggagtgttcacctgttgttgtctgtgtcgtcccactgagtgcattcaccaccttttaaattttggtcactgtatgtatcagttctaaaatttccattttgttctctatattttaaatttcttggcttatattctattttcctgcaaatgtgtcagcatttgcttgtttgagctttttttttttcaagacagggtctcaactctgttacccaggctggagtgcagtggtgcgatctcagctcactgcaacctctgcctcctggttcaagcgattattgtgcctcagcctcctgagtagctgggattacaggcatgcaccaccacagcccagctaattttttgtatttttagtagagacagagttttgctatgttggccaggctggttttgaactcctggcctcaagtgatccacccacctcagcctcccaaagtgctgggattacaggccactacacctggcacatttgagtattttttttttttttttttttttgagatggagtctcgctctgtcatctaggctggagtgcagtggtgtgatctcagctcactgcagcctctgtctcccgggctcaagcgattctcttgcctcagcctcctgagtagctaggactacaggtgcatgccaacacgcccggctaatttttttaaaaaatatttttagtagagacagggtttcaccattttggccaggatggtctcgatctcctgacctcatgatccacccgcctcggccttccaaagtgctgggattacaggcatgagccaccgtgcctggcctcatttgagtatttttataatgtctcttttaaagtctttgtcagataattccactgtacatgttattcagtgtttggtgtccactgagttgtcatttgccagacaagtggagatttttgcagctcatccttgtattctcagtagttccgatatgtaccctcgacatgtgaatgttatcttatgagactctgttttatttgtatccaacagaagatgtttattatttatttggctttctgtgaactgaggtcttaatatcagctcattttaaaagtctttgcagtggtattcggatctatcctgtgtgtgcctatgagattgggtgcagtgtatcctgttagctccattctcagggcgtttgaatgtgaattaggaccagcgcaatgaatgctcaagttggggttgggcgttagaattcataaaagtctttatatgctcagattctgcagctccatcctcttcatgattgtgatcgtaaggacagtggaattttgcagttgtctataccttatcttgaagtagaactaaattgttacatttgaagaatgtacttcataaatttacaaaaataaaaaaataggttaatgttattaaaacaaaaaggcacaca

SEQ ID NO: 393 - DNA, 4825 bp, Homo sapien
agaaaccgacctaaggggattctcccatttggcccgtcctaccctaaagtcaccacctgctgcttttctggagcgcttaccagtgaccaagaggaacagaacacagagcagcctggcagtgtccaagcaacaagcctccgctcctccttcctgcaccctggggctcctgaaactcacatgagaaggagggctgtctgagattcgagggaaacaagctctcaggacttccggtcgccatgatggctgtgggcggtaaacgcggttagtgcaagcatctgggccatcttcaatggtaaaaaagatacagtaaagacataaataccacatttgacaaatggaaaaaaaggagtgtccagaaaagagtagcagcagtgaggaagagctgccgagacgggacagtggatccagtaggaacatagatgcatccaaactcattagactacaaggatcacggaaactgttggttgacaatagcatacgggaactgcaatacacaaaaactggaattttttttcaggctgaggcctgtgtgacaaatgatacggtatacagggagctaccctgtgtttctgagaccctttgtgacatctcacattttttccaagaagatgatgagacagaggcagagccattattgttccgtgctgttcctgagtgtcaactatctgggggggacattcccaggtaagaaaagctattccgttggaaaactattggacgctgtgtctcaatatcacagaggaacatgagaattagaggaatttgggtgtttttcatcgaactcaggggagagtgaatgagcttatgcaatactagcaatgaatccagaaatttttgaaacaaaccttaagcaatgaggttttcttccatggaggtgtctagagaacctatacacaaaaaggcaatgagcaatgcaatcgaagaccagtgggttattggttaagctgttactcaatacataaaaccaacctaattctctaggaaactggctgatgatgaggctgaaggccacagtggggtcctgaggtttaacaccggggaggggagaatgcgtctatttgtagggtatgccaatttccaagggttgaatatccccatcatggcagatttcaaactaccaacgtgaagcccctgatgagggagttgaaagaacacatgcagaagtctgtcatcctgctttcaccacacagatacaagagacataaataacctcaagggcatagactgctgaaaagtgtagaaaaatgactggaaattggtatgttttaatatgtattacttttgtttttaatatgatttatttaaatgttagcttgtatcatttaatttagactaatggttgtgttgaacaacttggttgcaaaagccctgaaaatggaaccgtcagctctcatgatctgggatgcgctgtctgcagttcagcgctgggttcctcccactttctaaacccctcctcagcaggcagactccagcatgcacatgcaccaggaaagagaatataaaatggcatgtttactcttgctgctttgcctgtagctacccgaatccatagcaaaatgtgtagccgcagacagcaaccagtcttaggatgtcagcccaggggtctctccatgcttggcttgcccacagaatccttccgagaaaagcgctgtaaagcctttctcttcatcccacttctctaggtacctgttctttttaaacctaatccacgtgtcagtttctctgctggtctctttcacgtcgaaataaacagatatctcaaggaatggatcaaaggcagagaatttgatggagttggttgccttgctccagaaggtatcacctgtgttagggcaggtttctctccagaggcatgacgaaccattggctcacgctgtatgtcatagaacccatattggctaatattggaatcacctgtgaggctttgaaagcgccgatgctttggtgccacctccagacttctgattcaattgatgtgggctgtgacctggtattgggtggtttttaaagcttcccaggtgtggtcaagtttggaattaccttggaatataaatgcatacattttacgcattggtgaattactgcttcagtctttgattccgacatcgtatgataccaatcggagcaatcaatttaagccagagaatctggctgtgtccacattgaacgtgggcataatacaaagagaagaaggagagatgtcaagacacatttggctcaagggagtgtgttatctctattatttataaatgtggataaaaatatcttcattcaaaatgtcttctatttcttgatagtctagatccgcccagtctaagagaactttctgtgatgacgggagtgttccattctctgctacacagtgttatagccgtgagtgatatgtagctgttgagcacttgaaatatggatagtgcaactgagaaactaaagtttacctaagtttaattcatacaaatttaaatagcatatccgggtagcggctactctacgggacagtgcagctctagttttcaataacatcgtcttcatcttcatcaactgattcttgatgtttttcatctttttgtaacatggggatcccaacctccagtgtatcagaagagcaggaatcttcagagggacaagattcaggagacatttgctcagaagagaatcaaatagtttcctcttatgcttctaaagtctgttttgagatcgaagaagattataaaaatcgtcagtttctggggcctgaaggaaatgtggatgttgagttgattgataagagcacaaacagatacagcgtttggttccccactgctggctggtatctgtggtcagccacaggcctcggcttcctggtaagggatgaggtcacagtgacgattgcgtttggttcctggagtcagcacctggccctggacctgcagcaccatgaacagtggctggtgggcggccccttgtttgatgtcactgcagagccagaggaggctgtcgccgaaatccacctcccccacttcatctccctccaagcaggtgaggtggacgtctcctggtttctcgttgcccattttaagaatgaagggatggtcctggagcatccagcccgggtggagcctttctatgctgtcctggaaagccccagcttctctctgatgggcatcctgctgcggatcgccagtgggactcgcctctccatccccatcacttccaacacattgatctattatcacccccaccccgaagatattaagttccacttgtaccttgtccccagcgacgccttgctaacaaaggcgatagatgatgaggaagatcgcttccatggtgtgcgcctgcagacttcgcccccaatggaacccctgaactttggttccagttatattgtgtctaattctgctaacctgaaagtaatgcccaaggagttgaaattgtcctacaggagccctggagaaattcagcacttctcaaaattctatgctgggcagatgaaggaacccattcaacttgagattactgaaaaaagacatgggactttggtgtgggatactgaggtgaagccagtggatctccagcttgtagctgcatcagcccctcctcctttctcaggagtgaggatgtggcctggatgctgcccaatcttgcctagaactggctgcacctgcttgtgccttaacccttggttaccctaaatccctgttatccagactcattgggactgctctagatcttcactatccaatacgggttactgtggcaacgccaacctttgaatccccctcctgcgcgctgagcggctcgtaaccatggagaccgaagcaggtttcccgcgtccgcctcctcacacagagactgcagccccggcgcccagaccctttggacaaggagatccaagcgggccccacaatgctcagcgggtaaagagctcctccccactcctctcccgccagcagacgaaggaaacaccccgcagcctgcacatgctcagatggagctctgggcccgcgggttctactgcgcaggccctcacactcagcaaagggacttggacgcgaaagccctggtggcgctcagccggytgggagttgtagctttctggctgctacagcaggagatacaggtggccaatgggtgagctggctggaggtaggaacaaggttaaggaagctgggatcttcgtgcagactggatcgtcactatagcaacaatgaaacatcgggaagggctagttctgctaggcagtctgccattttcattctttcatctttttttttaactcaaagcttactttgcaacaggcactgttctaggcactggggatacaatggaaaacaaaatagagcttctattttggcgggagatcgacttaataactgtgaacacgtgtcactggaaaaagcagtatgttaataagtaactgggctgctttgggaaaaatggaaatgcaggcaatgttagaacactggtacacacacctaattcattcatcctcacaaagccctatagacaggtactattatgacccctcaactgtaacataggctggaaggtcacatgacaaggaagtagtggagctgggatttgaacccaggcagtctggcttcatacttgataagcttaatcacaatgccaaactggtaaatagctgtgtggcataatttcaggtagtgataagtgctgtgaaggataaagcaaagaaaggggcagggatggctctttggagagactacttagggatggctttcaggaagaggtggcatttgagcaggggcccgagggattgatgtgacttgtgataaaagaaaaacttcagacgaattaaatttaaagaagtttaattggc

SEQ ID NO: 394 - DNA, 3565 bp, Homo sapien
agaaaccgacctaaggggattctcccatttggcccgtcctaccctaaagtcaccacctgctgcttttctggagcgcttaccagtgaccaagaggaacagaacacagagcagcctggcagtgtccaagcaacaagcctccgctcctccttcctgcaccctggggctcctgaaactcacatgagaaggagggctgtctgagattcgagggaaacaagctctcaggacttccggtcgccatgatggctgtgggcggtaaacgcggttagtgcaagcatctgggccatcttcaatggtaaaaaagatacagtaaagacataaataccacatttgacaaatggaaaaaaaggagtgtccagaaaagagtagcagcagtgaggaagagctgccgagacgggacagtggatccagtaggaacatagatgcatccaaactcattagactacaaggatcacggaaactgttggttgacaatagcatacgggaactgcaatacacaaaaactggaattttttttcaggctgaggcctgtgtgacaaatgatacggtatacagggagctaccctgtgtttctgagaccctttgtgacatctcacattttttccaagaagatgatgagacagaggcagagccattattgttccgtgctgttcctgagtgtcaactatctgggggggacattcccaggtaagaaaagctattccgttggaaaactattggacgctgtgtctcaatatcacagaggaacatgagaattagaggaatttgggtgtttttcatcgaactcaggggagagtgaatgagcttatgcaatactagcaatgaatccagaaatttttgaaacaaaccttaagcaatgaggttttcttccatggaggtgtctagagaacctatacacaaaaaggcaatgagcaatgcaatcgaagaccagtgggttattggttaagctgttactcaatacataaaaccaacctaattctctaggaaactggctgatgatgaggctgaaggccacagtggggtcctgaggtttaacaccggggaggggagaatgcgtctatttgtagggtatgccaatttccaagggttgaatatccccatcatggcagatttcaaactaccaacgtgaagcccctgatgagggagttgaaagaacacatgcagaagtctgtcatcctgctttcaccacacagatacaagagacataaataacctcaagggcatagactgctgaaaagtgtagaaaaatgactggaaattggtatgttttaatatgtattacttttgtttttaatatgatttatttaaatgttagcttgtatcatttaatttagactaatggttgtgttgaacaacttggttgcaaaagccctgaaaatggaaccgtcagctctcatgatctgggatgcgctgtctgcagttcagcgctgggttcctcccactttctaaacccctcctcagcaggcagactccagcatgcacatgcaccaggaaagagaatataaaatggcatgtttactcttgctgctttgcctgtagctacccgaatccatagcaaaatgtgtagccgcagacagcaaccagtcttaggatgtcagcccaggggtctctccatgcttggcttgcccacagaatccttccgagaaaagcgctgtaaagcctttctcttcatcccacttctctaggtacctgttctttttaaacctaatccacgtgtcagtttctctgctggtctctttcacgtcgaaataaacagatatctcaaggaatggatcaaaggcagagaatttgatggagttggttgccttgctccagaaggtatcacctgtgttagggcaggtttctctccagaggcatgacgaaccattggctcacgctgtatgtcatagaacccatattggctaatattggaatcacctgtgaggctttgaaagcgccgatgctttggtgccacctccagacttctgattcaattgatgtgggctgtgacctggtattgggtggtttttaaagcttcccaggtgtggtcaagtttggaattaccttggaatataaatgcatacattttacgcattggtgaattactgcttcagtctttgattccgacatcgtatgataccaatcggagcaatcaatttaagccagagaatctggctgtgtccacattgaacgtgggcataatacaaagagaagaaggagagatgtcaagacacatttggctcaagggagtgtgttatctctattatttataaatgtggataaaaatatcttcattcaaaatgtcttctatttcttgatagtctagatccgcccagtctaagagaactttctgtgatgacgggagtgttccattctctgctacacagtgttatagccgtgagtgatatgtagctgttgagcacttgaaatatggatagtgcaactgagaaactaaagtttacctaagtttaattcatacaaatttaaatagcatatccgggtagcggctactctacgggacagtgcagctctagttttcaataacatcgtcttcatcttcatcaactgattcttgatgtttttcatctttttgtaacatggggatcccaacctccagtgtatcagaagagcaggaatcttcagagggacaagattcaggagacatttgctcagaagagaatcaaatagtttcctcttatgcttctaaagtctgttttgagatcgaagaagattataaaaatcgtcagtttctggggcctgaaggaaatgtggatgttgagttgattgataagagcacaaacagatacagcgtttggttccccactgctggctggtatctgtggtcagccacaggcctcggcttcctggtaagggatgaggtcacagtgacgattgcgtttggttcctggagtcagcacctggccctggacctgcagcaccatgaacagtggctggtgggcggccccttgtttgatgtcactgcagagccagaggaggctgtcgccgaaatccacctcccccacttcatctccctccaagcaggtgaggtggacgtctcctggtttctcgttgcccattttaagaatgaagggatggtcctggagcatccagcccgggtggagcctttctatgctgtcctggaaagccccagcttctctctgatgggcatcctgctgcggatcgccagtgggactcgcctctccatccccatcacttccaacacattgatctattatcacccccaccccgaagatattaagttccacttgtaccttgtccccagcgacgccttgctaacaaaggtaagctgagtgatttaggagaccagagaagatgacgattatatttccaggttatccccttggcccctccagttcctcgtggaacagaaagggcaaggcatggttttcatggacagaagcaggagtcacccttcctgaggttcatccaaggtgctgactctggagctatgtgcttccctaaccatcttcagtagtgattcagtgctactgaaaaaggaaattcccttttctggctctcaagaaggagaaagttagtgattttgggggaccagctgacagagaagatg

SEQ ID NO: 395 - DNA, 432 bp, Homo sapien
caaagaccatgtctttctcacttctgcctgtgtacacctgctttctttacaacttttgaggaggccctggtcctttgggaccaggattgttcagacctttgtagaagctgagcagtataatttctagatgcactgacccatgacatagcacacaccaaaatgcccccacatcccactggaaatgcaattcattttctctaaaatagtttttgggggcattttaataattttactttgaggattattttgctaattttattttcaatggctgtggtttcttagaaatcattgtgcatagttaggaattccttgaagtgaaagaatctgctaattcttttcaaatataaaaaaatttacagatactaagtataacgatgtatagagttgatgtaacacagaatttcagggcatttcattacattttgactgtgg

SEQ ID NO: 396 - DNA, 432 bp, Homo sapien; identical to SEQ ID NO: 395

SEQ ID NO: 397 - DNA, 114 bp, Homo sapien
gggagtggcagccttagttatggtttgccaagtttagtgtggtcaggaaggctgcagagccccctctgtgtcctgagagataatgccagtggctcctgtgtgtatagaacttga

SEQ ID NO: 398 - DNA, 114 bp, Homo sapien; identical to SEQ ID NO: 397

SEQ ID NO: 399 - DNA, 635 bp, Homo sapien
tgaaattttttagaaagagtttgatagagaccaatgcttgataaataaaaaagaaaagcagaatacaaaactgttgacttaggtgtaaaataattgcaaaggagtggggaaaagaataaaaatctggaggattttgcatccggattgctcttttccttttccctgctcttcccagaaccccctcccaagtccatattggaaagtgggggcaatgtgctgagtggttccctaaaaaggaaaatatggaacccaagttagcagctcctggtcgaagaaaaggacagcaataggacagacccaaatggcaaaggcaaagacgggagaatgactgtgcagttgtgttttctgtaaaaacaaaaatttatgcacaaccatacatctttcagattctccgctgtaaccaacctccaggtcacagccacaggacttcccacggacttcccctgctcttaaagcaaactgcagaaccaagcgtggacttctgctcctgagggggacggaaggacagtcccctgcggtcatctctataggagatgggggccatgggtgggagagaaactccctgttgcactttgtagccctcagtatgattaaagtgtttaccatgtacataaattatgctttttaagttcaaa

SEQ ID NO: 400 - DNA, 710 bp, Homo sapien
tgaaattttttagaaagagtttgatagagaccaatgcttgataaataaaaaagaaaagcagaatacaaaactgttgacttaggtgtaaaataattgcaaaggagtggggaaaagaataaaaatctggaggattttgcatccggattgctcttttccttttccctgctcttcccagaaccccctcccaagtccatattggaaagtgggggcaatgtgctgagtggttccctaaaaaggaaaatatggaacccaagttagcagctcctggtcgaagaaaaggacagcaataggacagacccaaatggcaaaggcaaagacgggagaatgactgtgcagttgtgttttctgtaaaaacaaaaatttatgcacaaccatacatctttcagattctccgctgtaaccaacctccaggtcacagccacaggacttcccacggacttcccctgctcttaaagcaaactgcagaaccaagcgtggacttctgctcctgagggggacggaaggacagtcccctgcggtcatctctataggagatgggggccatgggtgggagagaaactccctgttgcactttgtagccctcagtatgattaaagtgtttaccatgtacataaattatgctttttaagttcaaaaaaaaaaaaaaaaaaaaaattggcgggccaagcttattccctttagtacgtgttagctcagcactcaagccagca

SEQ ID NO: 401 - DNA, 920 bp, Homo sapien
acaggttggagagaaattgcacacaaaactttgaggtgttttcctaatttcaaagatccaaaacagaaggagacagaataaattgagactcctcagagataaaggacacggctgagagctgagagctgagaactgaataaacctcgagttgtcagcttgtgtgtgcaggaggcatccctgccggcctcttccttcctcagcaccaacccctcccactgtcccgcccaggcatctcttggcaggacagtgtggccttggccaagctgtttagtgctgggggacccggataccacgtgggtccctgagactaaccaagcctcacgctgaccaagtgccaggcctcactgaagctgacctccgcgttaaccctggacacaagccgagcaggaaggataatgccggcttgacaactccactggtttctgctcccactggccctacctctgttagaggtgttcgccaggcaccccatgcggtcaccagcagacagccgctttctgcacaagttccaagatggactcacagcagtccccgccagccatgacgctgagatgggtgtacacccagctctggaggaacccaaccgcctgtggtctctccacaacggctgcaaaataccattctccgctgtaaccaacctccaggtcacagccacaggacttcccacggacttcccctgctcttaaagcaaactgcagaaccaagcgtggacttctgctcctgagggggacggaaggacagtcccctgcggtcatctctataggagatgggggccatgggtgggagagaaactccctgttgcactttgtagccctcagtatgattaaagtgtttaccatgtacataaatcatgctttttaagttcacatgtcttatatacttttacgttactttttaaaattaaaagacagttaactttt

SEQ ID NO: 402 - DNA, 930 bp, Homo sapien
acaggttggagagaaattgcacacaaaactttgaggtgttttcctaatttcaaagatccaaaacagaaggagacagaataaattgagactcctcagagataaaggacacggctgagagctgagagctgagaactgaataaacctcgagttgtcagcttgtgtgtgcaggaggcatccctgccggcctcttccttcctcagcaccaacccctcccactgtcccgcccaggcatctcttggcaggacagtgtggccttggccaagctgtttagtgctgggggacccggataccacgtgggtccctgagactaaccaagcctcacgctgaccaagtgccaggcctcactgaagctgacctccgcgttaaccctggacacaagccgagcaggaaggataatgccggcttgacaactccactggtttctgctcccactggccctacctctgttagaggtgttcgccaggcaccccatgcggtcaccagcagacagccgctttctgcacaagttccaagatggactcacagcagtccccgccagccatgacgctgagatgggtgtacacccagctctggaggaacccaaccgcctgtggtctctccacaacggctgcaaaataccattctccgctgtaaccaacctccaggtcacagccacaggacttcccacggacttcccctgctcttaaagcaaactgcagaaccaagcgtggacttctgctcctgagggggacggaaggacagtcccctgcggtcatctctataggagatgggggccatgggtgggagagaaactccctgttgcactttgtagccctcagtatgattaaagtgtttaccatgtacataaatcatgctttttaagttcacatgtcttatatacttttacgttactttttaaaattaaaagacagttaacttttaagaataaaa

SEQ ID NO: 403 - DNA, 1435 bp, Homo sapien
cttaagcgccccggagccgggaggcgaacttgggacccgctggcctcgctcggatcgacccgtacggattcgagcggcctgaggacttcgacgacgccgcctacgagaagtttttctccagctacctggtcacgctcacccgcagggcgatcaaatggtcccggctgctgcagggcgggggcgtccccaggagccggacagcaaatatccaccaggagcccttaggaagacagcttcctcttcctccctggaaagactaaattcaacaaacttagtcctgttggattcctatttcattctccatctcgagaatagacgtctgcagggaagcagcttcagggccgttggcttctttgagacctccttcctggtggcttagaatattaacaccacctaagttaaatcgagaaaacatattttcaaagatacaccgaaaaactggggatttgcctaactttgtcagggtagacagatggacgtcagttctctggatgtagcttctttttaaaaatttcccaactgttttgacttgatattttatacttctccaaacattagtgatgctctgtgcgttagccctgcccttgggaaagtgtcagtctgtgaggacaagtaaacaattttctttcttctataaagaaacagtgtaaatccagataacaaacttatcaaaaagtcgcagaattctttgttccgtgaagcttccgggtgttgctccaactgccagagctgctcgggggccttgggtgcaggctcggtgccttctgttcactttacgatgaggaaaccaaggcacgctcagggtctggagcctgcaagtcatagcggagcagagtgtctgactccagagctggtgcatttagccattttgacctttctcttaaatacaaccttgatattattgttattatcgagacagggtcttgctctgtcacccaggcaggaggacagtgggacgatcatagctcactgcagcctagaggagcaatcctcccgcctcagcctccagagtagctgggactacaggtgtgcaccaccatgcccagctaatttttaagggtttttttgtagagatggagtctcctgggattacaggcatgagccactgcacctggcctatcaaataattttaacaatttacagtaaaattcactcttaacagtatatggttctgtgaatttggacaaacacgcagctaggcagtcatcaccacagtcaagattctgtcgccttcaacaatcctgtcctttgaagtcagcccactgctcacatcactgagctcttccccattcccgtagttcagccatttctatggtgtcattagtggaatcatgcagattgtagcctttgagtctggtttctttcacctaatgcgttggagatccatccaggaccttgtatgtgtcaatagttccttcctttttattgctgaggt

SEQ ID NO: 404 - DNA, 928 bp, Homo sapien
atttattcttaaaagttaactgtcttttaattttaaaaagtaacgtaaaagtatataagacatgtgaacttaaaaagcataatttatgtacatggtaaacactttaatcatactgagggctacaaagtgcaacagggagtttctctcccacccatggcccccatctcctatagagatgaccgcaggggactgtccttccgtccccctcaggagcagaagtccacgcttggttctgcagtttgctttaagagcaggggaagtccgtgggaagtcctgtggctgtgacctggaggttggttacagcggagaatggtattttgcagccgttgtggagagaccacaggcggttgggttcctccagagctgggtgtacacccatctcagcgtcatggctggcggggactgctgtgagtccatcttggaacttgtgcagaaagcggctgtctgctggtgaccgcatggggtgcctggcgaacacctctaacagaggtagggccagtgggagcagaaaccagtggagttgtcaagccggcattatccttcctgctcggcttgtgtccagggttaacgcggaggtcagcttcagtgaggcctggcacttggtcagcgtgaggcttggttagtctcagggacccacgtggtatccgggtcccccagcactaaacagcttggccaaggccacactgtcctgccaagagatgcctgggcgggacagtgggaggggttggtgctgaggaaggaagaggccggcagggatgcctcctgcacacacaagctgacaactcgaggtttattcagttctcagctctcagctctcagccgtgtcctttatctctgaggagtctcaatttattctgtctccttctgttttggatctttgaaattaggaaaacacctcaaagttttgtgtgcatttctctccacctgt

SEQ ID NO: 405 - DNA, 695 bp, Homo sapien
atttattcttaaaagttaactgtcttttaattttaaaaagtaacgtaaaagtatataagacatgtgaacttaaaaagcataatttatgtacatggtaaacactttaatcatactgagggctacaaagtgcaacagggagtttctctcccacccatggcccccatctcctatagagatgaccgcaggggactgtccttccgtccccctcaggagcagaagtccacgcttggttctgcagtttgctttaagagcaggggaagtccgtgggaagtcctgtggctgtgacctggaggttggttacagcggagaatctgaaagatgtatggttgtgcataaatttttgtttttacagaaaacacaactgcacagtcattctcccgtctttgcctttgccatttgggtctgtcctattgctgtccttttcttcgaccaggagctgctaacttgggttccatattttcctttttagggaaccactcagcacattgcccccactttccaatatggacttgggagggggttctgggaagagcagggaaaaggaaaagagcaatccggatgcaaaatcctccagatttttattcttttccccactcctttgcaattattttacacctaagtcaacagttttgtttttgcttttttttttttttttttttagcattggtctctatcaactctttctaaaaatttca

SEQ ID NO: 406 - DNA, 2087 bp, Homo sapien
actttttcacatttttattgtcaattaaaatatccctacaaaatggagtagctttcaatatatagagattaactgcacgagttggacagtgacgtctgccactgaaaccgtgttctcccagctgtggcgtcccacctgaggtgctcacagctgagcccagccggcctccttgttctcagctgggcctctcactgctttgcccctttgctgctgctctgcacggctgccaggaagctttgcagagcagccatctgaccgcggctctgtttcttgaccacctgcattgaatggtgaagtgggcgtgggggcggttctgtagccagtctggtttgtgctctgttgagagggagaggagagcagaatttttaaaggagtatatgtaccagttttggtggagatggacgaagttctgggtctctttaatatttgatttaagaagagaactggtgagagtggaaagtgtggcaggaacgcgtgggccccgcaggcccctggtccagctcacacgctgtccgtcctctcggccttcagtgaagcgctatgtccggaaaggggtcccgctggagcaccgtgcccgcgtctggatggtgctgagtggggcccaggcgcagatggaccagaatcccggctactaccaccagcttctccagggagagagaaaccccaggctggaggacgccatcaggacagacctgaaccggaccttccccgacaacgtgaagttccggaagaccacggacccctgcttacagaggaccctgtacaatgtgctgctggcatatgggcaccataaccagggagtgggctactgccagggaatgaattttatagcaggatatctgattcttataacaaataatgaagaagaatctttttggctgttagatgctcttgttggaagaatactaccagattactacagcccggccatgctgggcctgaagaccgaccaggaggtcctcggggagctggtgcgggcgaagctgccggctgtgggggccctgatggagcgtctcggtgtgctgtggacgctgctggtgtcccgctggttcatctgcctgtttgtggacatcttgcccgtggagacagtgcttcggatctgggactgtttgtttaacgaaggctcgaagattatcttccgggtggccctgaccttaattaagcagcaccaggagttgattttggaagccaccagcgttccagacatttgcgataagtttaagcagataaccaaagggagtttcgtgatggagtgtcacacgtttatgcaggtgtgtggggctgcacgtggctcagtcccctcccagggggccccgcctcacctgcagcccgggggctgctctgaccacccggagggtgcacaggacgggcaccagtgggcatagggcacaggatgagcctccagctctgtcctgcatctgccccctgcgcctggcctccgagggctttcctgtctatggcggccctgtcttcttggccctggcactgcggacgctgctcctggtcctaatggctgtactcatctgctgtgtgtggtgccagaagtgtggcttcccgaggcccggcctccccactgggtcctggacctggcgcaggccgtatagactcaggtcctgatgagggcgttgtgggagctgtacctgacaggccttctgaggaagccaagacgccaggagaggctcaggcctgggagtcagtagtttcctaagagggagtggaggctcggggccactctgggtgcagcatggcaaacgtgggcggtatttcagcagctgggccttcatcaaagagaagaccatgttggccgggcgcggtggctcacgcctgcagtcccagcactttgggaggccaaggcgtgtggatcacctgaggtcaggagttcaagaccagcctggccaacacggtgaaaccccgtctctactaaaaaatacaaaaattagccaggtgtggtggctcacgcttatgtagtcccagttactcgggaggctgaggcacgagaatcacttgaacctgggaggcggaggttgcagtgagccgagatcgcgccactgcactccagcctgggcaacagagtgagactctgtctc

SEQ ID NO: 407 - DNA, 1100 bp, Homo sapien
tagaggatcccccgtattggtggtgctaccctctatactaatcttcctacacatctccttaattataacattcacagccacagaactaatcatattttatatcttcttcgaaaccacacttatccccaccttggctatcatcacccgatgaggcaaccagccagaacgcctgaacgcaagcaccaccaatactgtattggtggtgctgcctgtattggtggtgctggcatatgggcaccataaccagggagtgggctactgccagggaatgaattttatagcaggatatctgattcttataacaaataatgaagaagaatctttttggctgttagatgctcttgttggaagaatactaccagattactacagcccggccatgctgggcctgaagaccgaccaggaggtcctcggggagctggtgcgggcgaagctgccggctgtgggggccctgatggagcgtctcggtgtgctgtggacgctgctggtgtcccgctggttcatctgcctgtttgtggacatcttgcccgtggagacagtgcttcggatctgggactgtttgtttaacgaaggctcgaagattatcttccgggtggccctgaccttaattaagcagcaccaggagttgattttggaagccaccagcgttccagacatttgcgataagtttaagcagataaccaaagggagtttcgtgatggagtgtcacacgtttatgcagaaaatattttcagaacctggaagcttatccatggccaccgtcgccaagctccgcgagagctgcagggcccggctgctggcacaggggtgagcgtgcctgtcccctgcgttgctcgtctctacactgacgatgcccctttccagagttgacactggaccaactttcactgctttcctttttagtgttgtaaatacttgacatcactacactttagttgtgaattttttaaaagagcagtttaaaatcaggtcattctaccagcttttgatgattagctatgaagtcatactttttaaagaaaacttatttttacctgagagatcaataatatataaaatgtgagtgtgggtttgtatctaataaagtatgccaacacctg

SEQ ID NO: 408 - DNA, 1186 bp, Homo sapien
cttaagcgccccggagccgggaggcgaacttgggacccgctggcctcgctcggtgcgcgcctccctccccgcatgcagcccgccgagcgctcgcgggtccccaggatcgacccgtacggattcgagcggcctgaggacttcgacgacgccgcctacgagaagtttttctccagctacctggtcacgctcacccgcagggcgatcaaatggtcccggctgctgcagggcgggggcgtccccaggagccggacagtgaagcgctatgtccggaaaggggtcccgctggagcaccgtgcccgcgtctggatggtgctgagtggggcccaggcgcagatggaccagaatcccggctactaccaccagcttctccagggagagagaaaccccaggctggaggacgccatcaggacaggtgaggcggtgggggtcgagctctggtgcagggcccgggggccggaaggaaccggtttccacccagtgtctagcctcagcgtccaggggtgagcggtgcgcctgctgcttttaacttgaagttacgtcttcctccatgaaagaatcaaaactgaagcggtattttgcagccgttgtggagagaccacaggcggttgggttcctccagagctgggtgtacacccatctcagcgtcatggctggcggggactgctgtgagtccatcttggaacttgtgcagaaagcggctgtctgctggtgaccgcatggggtgcctggcgaacacctctaacagaggtagggccagtgggagcagaaaccagtggagttgtcaagccggcattatccttcctgctcggcttgtgtccagggttaacgcggaggtcagcttcagtgaggcctggcacttggtcagcgtgaggcttggttagtctcagggacccacgtggtatccgggtcccccagcactaaacagcttggccaaggccacactgtcctgccaagagatgcctgggcgggacagtgggaggggttggtgctgaggaaggaagaggccggcagggatgcctcctgcacacacaagctgacaactcgaggtttattcagttctcagctctcagctctcagccgtgtcctttatctctgaggagtctcaatttattctgtctccttctgttttggatctttgaaattaggaaaacacctcaaagttttgtgtgcatttctctccacctgt

SEQ ID NO: 409 - DNA, 1464 bp, Homo sapien
actttttcacatttttattgtcaattaaaatatccctacaaaatggagtagctttcaatatatagagattaactgcacgagttggacagtgacgtctgccactgaaaccgtgttctcccagctgtggcgtcccacctgaggtgctcacagctgagcccagccggcctccttgttctcagctgggcctctcactgctttgcccctttgctgctgctctgcacggctgccaggaagctttgcagagcagccatctgaccgcggctctgtttcttgaccacctgcattgaatggtgaagtgggcgtgggggcggttctgtagccagtctggtttgtgctctgttgagagggagaggagagcagaatttttaaaggagtatatgtaccagttttggtggagatggacgaagttctgggtctctttaatatttgatttaagaagagaactggtgagagtggaaagtgtggcaggaacgcgtgggccccgcaggcccctggtccagctcacacgctgtccgtcctctcggccttcagtgaagcgctatgtccggaaaggggtcccgctggagcaccgtgcccgcgtctggatggtgctgagtggggcccaggcgcagatggaccagaatcccggctactaccaccagcttctccagggagagagaaaccccaggctggaggacgccatcaggacaggtgaggcggtgggggtcgagctctggtgcagggcccgggggccggaaggaaccggtttccacccagtgtctagcctcagcgtccaggggtgagcggtgcgcctgctgcttttaacttgaagttacgtcttcctccatgaaagaatcaaaactgaagcggtattttgcagccgttgtggagagaccacaggcggttgggttcctccagagctgggtgtacacccatctcagcgtcatggctggcggggactgctgtgagtccatcttggaacttgtgcagaaagcggctgtctgctggtgaccgcatggggtgcctggcgaacacctctaacagaggtagggccagtgggagcagaaaccagtggagttgtcaagccggcattatccttcctgctcggcttgtgtccagggttaacgcggaggtcagcttcagtgaggcctggcacttggtcagcgtgaggcttggttagtctcagggacccacgtggtatccgggtcccccagcactaaacagcttggccaaggccacactgtcctgccaagagatgcctgggcgggacagtgggaggggttggtgctgaggaaggaagaggccggcagggatgcctcctgcacacacaagctgacaactcgaggtttattcagttctcagctctcagctctcagccgtgtcctttatctctgaggagtctcaatttattctgtctccttctgttttggatctttgaaattaggaaaacacctcaaagttttgtgtgcatttctctccacctgt

SEQ ID NO: 410 - DNA, 403 bp, Homo sapien
gaacccggagccggagctaggtccgtcccagcgaggctgcgcttcgagtcccttagcgcctggggacggcgcggcagggcctggaggggagcggggacagatggctggcgcgttaaagaggggcgcccgcgaccgcctctctatagtgccaactagggagccctgtgagcgaggacggcgctgcgagtctgtccctggcgcgctcctgggtgggattctttcactgggtgtggctgttgggatttgagaccgtgtgactccggagattcggggaagccagttcctatattttccatttctgtatttttaaatggtaaaaacaatgaaaaggagaacaatattttgtgaaatatgaaaatcatacatgtcaaatttcagtgtccataaataaaagttttattgg

SEQ ID NO: 411 - DNA, 669 bp, Homo sapien
gaacccggagccggagctaggtccgtcccagcgaggctgcgcttcgagtcccttagcgcctggggacggcgcggcagggcctggaggggagcggggacagatggctggcgcgttaaagaggggcgcccgcgaccgcctctctatagtgccaactagggagccctgtgagcgaggacggcgctgcgagtctgtccctggcgcgctcctgggtgggattctttcactgggtgtggctgttgggatttgagaccgtgtgactccggagattcggggaagccagttcctatattttccatttctgtatttttaaatggtaaaaacaatgaaaaggagaacaatattttgtgaaatatgaaaatcatacatgtcaaatttcagtgtccataaataaaagttttattggagcacagctatactcatttgtttgtttatgtatgtccatggctattttcacactagaaggtcaaagtgagtagttgtgcatgcctcaaatatttactgttagttcctttagaaaaaattagctgataccctgaatgagactcttggttttctgtctccatagtaatgctcttttttttttttttttttttttaaaaacggggtcccattttgaccctaaggggggggtgcaaaagggcattttgggcacacggaaatttcggcccc

SEQ ID NO: 412 - DNA, 403 bp, Homo sapien; identical to SEQ ID NO: 410

SEQ ID NO: 413 - DNA, 831 bp, Homo sapien
cttgtcatctttaggtcctgctgcccctgctgcctcagccctcaggctcctaactgctcaagccagaaggagctacaaagccaaatcatttgtcatttttctctggcagattgttttaaaatctccctcccctcttttattttaattatgccacctgtgttaatcctatagcctgcttctttgctttgtggattactgatttcaagttctataacttggggaaagttaggttgagtgaatgggaggacagacactgaatgtgtgttttggaaaaatggactctctatcttcagattattcagcttctccacctatcacctctacaacttggccttcattggagaagttttagttggcttattcctggaacaagaccacctagaggcttttagccttgtcagcctgccctcttctgaggtttggaccttgttttaaattgtgtgcatggtgggcttgagactctcttgtaatggaggtaatgggactatcactgaggggttcagcctatccaggtaggctaccgttctagtcatacccatcacttaaattctgccacagtctgcacagacggttggtcctccaggcatattgtcctattaagccaaataggtggacatcatgggatggatgaggtcatcatgaaaacagatttactggatttatggacctagtatatactatgtaacagatggaaaactgaattttacaatctataggtacctttgaaaggtcataaagggtaaaagtctatagttttccagaaaataattcttaaaactgggttttatgtctagatttaaatcatgtatctgtctgtagtgcttcaaatgt

SEQ ID NO: 414 - DNA, 2078 bp, Homo sapien
cccacccaacctacggctaggacgaggccccgggttaatcggccgagggttgagctgtaccatggagcatcctcctgtgtcctgccaacccctgccattatagtcaccggagactcctttacctatccctatctgttagggttttcagatgtcctctcgctgggtttatatttgaaggtatagaatctgggaaagggtggggtgcaagctaaccaaatagggatgctagggttgggtggggaattgaggactcttctgtgcttttattgtagggctggggatcgaggatctgggcaaaaaaatatgacatttccaaccagggacaaaatggaggcttgggcttagtgatgggtaaatggaagactggttgagtgggatgataatgggagaacttactgatgctcttttgggaaaaggtgctttaaagactcgatttgggagcctactggggcaaggcgactggggaggtgtacgtgttagtcaagtggaggtcaggtgggttatcttctgcctccttcactggcttcatgtgaacttgcctgtgacagaatatcttgccctagatgtcctcttccctcttgccatcgtgcaaaagcattcgatcttatgaccgtgagttcttatttgtggatgctaataactggggtaatctcagggagtactggggccatggctctttcccttgcttctctttctgctcactgctttgctttcaggtgcttagctgctcctttttatttctttgcaggactgggaaagcatgggaggaggattttgataagtttcttgttctctgcgtggtgatggggtggtctgagggccaagttaataagcctacctttggttattaccctggaaaattgagggttgatggtagggttatgattgtggcctgtgtatttgcaatttttctttgtcagtgtggctttctgtcatcttcctttttctccagtgagggttctgccactgtctcaatcccttggttcctgcaaaaaacagctaaatgtgctctcagggccagtggtgatgttctgtgttgcagccccagctcttgaaagtgacctggcccagatgagctctgcctgcttgtcatctttaggtcctgctgcccctgctgcctcagccctcaggctcctaactgctcaagccagaaggagctacaaagccaaatcatttgtcatttttctctggcagattgttttaaaatctccctcccctcttttattttaattatgccacctgtgttaatcctatagcctgcttctttgctttgtggattactgatttcaagttctataacttggggaaagttaggttgagtgaatgggaggacagacactgaatgtgtgttttggaaaaatggactctctatcttcagattattcagcttctccacctatcacctctacaacttggccttcattggagaagttttagttggcttattcctggaacaagaccacctagaggcttttagccttgtcagcctgccctcttctgaggtttggaccttgttttaaattgtgtgcatggtgggcttgagactctcttgtaatggaggtaatgggactatcactgaggggttcagcctatccaggtaggctaccgttctagtcatacccatcacttaaattctgccacagtctgcacagacggttggtcctccaggcatattgtcctattaagccaaataggtggacatcatgggatggatgaggtcatcatgaaaacagatttactggatttatggacctagtatatactatgtaacagatggaaaactgaattttacaatctataggtacctttgaaaggtcataaagggtaaaagtctatagttttccagaaaataattcttaaaactgggttttatgtctagatttaaatcatgtatctgtctgtagtgcttcaaatgtggccaggtgtggtagctcacacctgtaattcccagcgctttgggaatttgaggcaagaggattgctagaggccaggattttgagaccagcttcggcaatacggtgagaccttgtctctaccaaaagaaaaaaaaaaaaaaaaagatctttaattaagcggtc

SEQ ID NO: 415 - DNA, 1708 bp, Homo sapien
tgcctgttgagctgtaccatggagcatcctcctgtgtcctgccaacccctgccattatagtcaccggagactcctttacctatccctatctgttagggttttcagatgtcctctcgctgggtttatatttgaaggtatagaatctgggaaagggtggggtgcaagctaaccaaatagggatgctagggttgggtggggaattgaggactcttctgtgcttttattgtagggctggggatcgaggatctgggcaaaaaatatgacatttccaaccagggacaaaatggaggcttgggcttagtgatgggtaaatggaagactggttgagtgggatgataatgggagaacttactgatgctcttttgggaaaaggtgctttaaagactcgatttgggagcctactggggcaaggcgactggggaggtgtacgtgttagtcaagtggaggtcaggtgggttatcttctgcctccttcactggcttcatgtgaacttgcctgtgacagaatatcttgccctagatgtcctcttccctcttgccatcgtgcaaaagcattcgatcttatgaccgtgagttcttatttgtggatgctaataactggggtaatctcagggagtactggggccatggctctttcccttgcttctctttctgctcactgctttgctttcaggtgcttagctgctcctttttatttctttgcaggactgggaaagcatgggaggaggattttgataagtttcttgttctctgcgtggtgatggggtggtctgagggccaagttaataagcctacctttggttattaccctggaaaattgagggttgatggtagggttatgattgtggcctgtgtatttgcaatttttctttgtcagtgtggctttctgtcatcttcctttttctccagtgagggttctgccactgtctcaatcccttggttcctgcaaaaaacagctaaatgtgctctcagggccagtggtgatgttctgtgttgcagccccagctcttgaaagtgacctggcccagatgagctctgcctgcttgtcatctttaggtcctgctgcccctgctgcctcagccctcaggctcctaactgctcaagccagaaggagctacaaagccaaatcatttgtcatttttctctggcagattgttttaaaatctccctcccctcttttattttaattatgccacctgtgttaatcctatagcctgcttctttgctttgtggattactgatttcaagttctataacttggggaaagttaggttgagtgaatgggaggacagacactgaatgtgtgttttggaaaaatggactctctatcttcagattattcagcttctccacctatcacctctacaacttggccttcattggagaagttttagttggcttattcctggaacaagaccacctagaggcttttagccttgtcagcctgccctcttctgaggtttggaccttgttttaaattgtgtgcatggtgggcttgagactctcttgtaatggaggtaatgggactatcactgaggggttcagcctatccaggtaggctaccgttctagtcatacccatcacttaaattctgccacagtctgcacagacggttggtcctccaggcatattgtcctattaagccaaataggtggacatcatgggatggatgaggtcatcatgaaaacagatttactggatttatggac

SEQ ID NO: 416 - DNA, 1561 bp, Homo sapien
tgcctgttgagctgtaccatggagcatcctcctgtgtcctgccaacccctgccattatagtcaccggagactcctttacctatccctatctgttagggttttcagatgtcctctcgctgggtttatatttgaaggtatagaatctgggaaagggtggggtgcaagctaaccaaatagggatgctagggttgggtggggaattgaggactcttctgtgcttttattgtagggctggggatcgaggatctgggcaaaaaatatgacatttccaaccagggacaaaatggaggcttgggcttagtgatgggtaaatggaagactggttgagtgggatgataatgggagaacttactgatgctcttttgggaaaaggtgctttaaagactcgatttgggagcctactggggcaaggcgactggggaggtgtacgtgttagtcaagtggaggtcaggtgggttatcttctgcctccttcactggcttcatgtgaacttgcctgtgacagaatatcttgccctagatgtcctcttccctcttgccatcgtgcaaaagcattcgatcttatgaccgtgagttcttatttgtggatgctaataactggggtaatctcagggagtactggggccatggctctttcccttgcttctctttctgctcactgctttgctttcaggtgcttagctgctcctttttatttctttgcaggactgggaaagcatgggaggaggattttgataagtttcttgttctctgcgtggtgatggggtggtctgagggccaagttaataagcctacctttggttattaccctggaaaattgagggttgatggtagggttatgattgtggcctgtgtatttgcaatttttctttgtcagtgtggctttctgtcatcttcctttttctccagtgagggttctgccactgtctcaatcccttggttcctgcaaaaaacagctaaatgtgctctcagggccagtggtgatgttctgtgttgcagccccagctcttgaaagtgacctggcccagaatgccccatacctgcttcaagttttctctgcccttccttattccaaccatagggcagtatcaggcaacgccattacccccactccactactggttcctttctgggtcccagccccagcactcattccagcctactgcctaaaggatctactagcctgtaaataccacagcagcccattccccacttcctaagaggccaaaccccagaaccatcccattggaacacaggttattcctgaactggagaaaagtcagtgaaaatggtcaagcacaggcagaggaaaatgggcatcatttactgcattttggtgtgactaactcaagttgagggctgaggaccaggccacctgccctggaaagtctgaaagatggcaggctagcaggacgacgatgagctaaatccttctgggccacagggcaatccttctaattccgacattcaaacccctttcctcaccagtcctgggttctctgactgccttccctttagctatcatgtcttcctggatgtcaaattggctcctttgacactga

SEQ ID NO: 417 - DNA, 1994 bp, Homo sapien
gttgagctgtaccatggagcatcctcctgtgtcctgccaacccctgccattatagtcaccggagactcctttacctatccctatctgttagggttttcagatgtcctctcgctgggtttatatttgaaggtatagaatctgggaaagggtggggtgcaagctaaccaaatagggatgctagggttgggtggggaattgaggactcttctgtgcttttattgtagggctggggatcgaggatctgggcaaaaaaaatatgacatttccaaccagggacaaaatggaggcttgggcttagtgatgggtaaatggaagactggttgagtgggatgataatgggagaacttactgatgctcttttgggaaaaggtgctttaaagactcgatttgggagcctactggggcaaggcgactggggaggtgtacgtgttagtcaagtggaggtcaggtgggttatcttctgcctccttcactggcttcatgtgaacttgcctgtgacagaatatcttgccctagatgtcctcttccctcttgccatcgtgcaaaagcattcgatcttatgaccgtgagttcttatttgtggatgctaataactggggtaatctcagggagtactggggccatggctctttcccttgcttctctttctgctcactgctttgctttcaggtgcttagctgctcctttttatttctttgcaggactgggaaagcatgggaggaggattttgataagtttcttgttctctgcgtggtgatggggtggtctgagggccaagttaataagcctacctttggttattaccctggaaaattgagggttgatggtagggttatgattgtggcctgtgtatttgcaatttttctttgtcagtgtggctttctgtcatcttcctttttctccagtgagggttctgccactgtctcaatcccttggttcctgcaaaaaacagctaaatgtgctctcagggccagtggtgatgttctgtgttgcagccccagctcttgaaagtgacctggcccagatgagctctgcctgcttgtcatctttaggtcctgctgcccctgctgcctcagccctcaggctcctaactgctcaagccagaaggagctacaaagccaaatcatttgtcatttttctctggcagattgttttaaaatctccctcccctcttttattttaattatgccacctgtgttaatcctatagcctgcttctttgctttgtggattactgatttcaagttctataacttggggaaagttaggttgagtgaatgggaggacagacactgaatgtgtgttttggaaaaatggactctatcttcagattattcagcttctccacctatcacctctacaacttggccttcattggagaagttttagttggcttattcctggaacaagaccacctagaggcttttagccttgtcagcctgccctcttctgaggtttggaccttgttttaaattgtgtgcatggtgggcttgagactctcttgtaatggaggtaatgggactatcactgaggggttcagcctatccaggtaggctaccgttctagtcatacccatcacttaaattctgccacagtctgcacagacggttggtcctccaggcatattgtcctattaagccaaataggtggacatcatgggatggatgaggtcatcatgaaaacagatttactggatttatggacctagtatatactatgtaacagatggaaaactgaattttacaatctataggtacctttgaaaggtcataaagggtaaaagtctatagttttccagaaaataattcttaaaactgggttttatgtctagatttaaatcatgtatctgtctgtagtgcttcaaatgtggccaggtgtggtagctcacacctgtaattcccagcgctttgggaatttgaggcaagaggattgctagaggccaggattttgagaccagcttcggcaatacggtgagaccttgtctctaccaaaaga

SEQ ID NO: 418 - DNA, 810 bp, Homo sapien
gattatgtttcttagagttctctaaataacggggcagggaaggtagtgtgaatgatgtaaaggtgtgccaaattggttctgcaaaattaaccttttttgaataaaatattcaattttctgaagcgagcaggctactttctcaagcaaaatttcatttgaatcctccacccccagcctgcagagagagagggagggagggagacctcttaagagttttatttgttctcttgcagtcttatgacttacttcttaatgaaaacccttattgttttctaagagaaaaaaaaagagaatgaatgcagtgttcgaaatgggattatgtagaatttttaggagcataaagagaaattgaagaattatgaaaacaaaggccagaaaagcaaacagtgttcttcctctacgtagcagccagatggcgttttaggcaaatacaccacaaactgcacagccaggtccccatctcaaagggctttccacggagcaaaagcagtttcgatcgtattgtcatcaccaccatcaactttttttttccactcacatgatgtatgccaatatcattattctcgttatttgtataaccgtcatcatcatcaatgtctcgtgaatttttgcgtgttatttttaacatagcatgtaaacagcacctccccacaaaaaaaactagctcaggataaacatctctaagagtatttcataggagctgatagtttgaccaacaaaaaaatgttttcttttcccaaaataaagttctgtggtttgtctcggggaaaaaaaatctatgtcgggtgcggagaaagaggtaatgaaatg

SEQ ID NO: 419 - DNA, 780 bp, Homo sapien
gattatgtttcttagagttctctaaataacggggcagggaaggtagtgtgaatgatgtaaaggtgtgccaaattggttctgcaaaattaaccttttttgaataaaatattcaattttctgaagcgagcaggctactttctcaagcaaaatttcatttgaatcctccacccccagcctgcagagagagagggagggagggagacctcttaagagttttatttgttctcttgcagtcttatgacttacttcttaatgaaaacccttattgttttctaagagaaaaaaaaagagaatgaatgcagtgttcgaaatgggattatgtagaatttttaggagcataaagagaaattgaagaattatgaaaacaaaggccagaaaagcaaacagtgttcttcctctacgtagcagccagatggcgttttaggcaaatacacccacaaactgcacagccaggtccccatctcaaagggctttccacggagcaaaagcagtttcgatcgtattgtcatcacscaccatcaactttttttttccactcacatgatgtatgccaatatcattattctcgttatttgtataaccgtcatcatcatcaatgtctcgtgaatttttgcgtgttatttttaacatagcatgtaaacagcacctccccacaaaaaaaactagctcaggataaacatctctaagagtatttcataggagctkatagtttgaccaacaaaaaaatgttttcttttcccaaaataaagttctgtggtttgtctcrggraaaaaaaaaaa

SEQ ID NO: 420 - DNA, 1458 bp, Homo sapien
  misc_feature (1448)..(1448): n=a, c, g or t
  misc_feature (1455)..(1455): n=a, c, g or t
caccacttgtggcctacttggctcttttttacaggtttttggttgacacttctctgcagaatagcacctggcacctctcaccaccactgaaaaggatggaattttatacacctctttttcctaggttctctctagcagttaccaagggaccatcggaggtacttattgtggctgtttacaaaagccttgcctccagtctgagtcacctcaccctactctctgcttcttccttttagctactctttttttcagtaaccctccctctttcctctgaaggcttgtgcttgcacacacaggcagacatactcatgcacgcgcacaccacacatgcttcctgtcctctggctctcccgtatcctatgtaaaacctcctactgtcatttaagtgaaacccttctagcacataagagttttcatctcagaagctcaattttacctttcacttttcagatagagaacacccaaggtttttaataatctggcgaatgtgttaaaaaaggacatattttttaaaatctagattgcaaaagtaatactgtagcattgttgagttcagacattatagaaagtgaaagttccctatcatttgtttcccataaccaccttgaatagtttagtggatatattttattctaagcacatgctgtttatcttcttgaaaacaggatcatggcatagatatactcttttgtaatttctcttattagaaaagaagattaatcatatatcaaacacgattccatgtcactccatatagatctttccctcattctgtttttacagctataagggagtctgctgtgaaaatgctccttcgattagtttataactgagtgtaaaatttggcatttcactcttgattatagtctttttctgtatattcacccccaattctttgagaatgaggagtaccctaattttgtaagcaaaattttggggggctttggggtgaaaactaatttaaatgcttattttctcagttgcctacctccatttaaaaatcagttttgagggctataaaaaaaccttatgatattaaggcctttttttctgtataaaaataacatacaatttattttttccatttattcaaaagactgaattacactagccaagaaatgatcagtctcgtgtaaaagaataacacacgttctccttgaatcaagactactctgagattcagaaatgccagtagcggagggtggggtgtgaccccttaagtaagtgtgactagttaaaggtgtatggatattctttgtggaaagcgggctgccagatacaatttcaggctgtttcatattacttcacacggtgctttcaaactgtttattttctctcttggcactagtgagtacagctcataactggccagataatatctaagtctaggaccaggacagtgaatgggttttaccatgatttgatcaaaagtaaacaaggaaaacaanaagcagnggg

SEQ ID NO: 421 - DNA, 5189 bp, Homo sapien
ttcccgagtagctgggattacaggcacccgccaccatgcgcagttaattttttgtatttttagtagagatggggtttcatcatgttggccaggctggtcttgaactcctgaccttaggtgttccgcctgcctcggcctcccaaagtgctgggattacaggcgtgagccactgcacccggccagggacatgcatggttttctacagagtggcttcagcttccacggttcatccctagacaattttgcctttttttttcaagacacggtcttgctctgttgcccaggctggatgacagtggcactgtcatggctcactgcagccttgacttcccagggtcaagcaatcctcccacctcggcctctggagtgccagcaggacgtgtgccaccacaccctgctaattttttattttatttttttagagatgggatctccctgtgttgcccgggctggtctcaaactcctggtcttaagtggtattcctgccttggcatcccaaagtgttggggttacaggcatgagccaccacttgtggcctacttggctcttttttacaggtttttggttgacacttctctgcagaatagcacctggcacctctcaccaccactgaaaaggatggaattttatacacctctttttcctaggttctctctagcagttaccaagggaccatcggaggtacttattgtggctgtttacaaaagccttgcctccagtctgagtcacctcaccctactctctgcttcttccttttagctactctttttttcagtaaccctccctctttcctctgaaggcttgtgcttgcacacacaggcagacatactcatgcacgcgcacaccacacatgcttcctgtcctctggctctcccgtatcctatgtaaaacctcctactgtcatttaagtgaaacccttctagcacataagagttttcatctcagaagctcaattttacctttcacttttcagatagagaacacccaaggtttttaataatctggcgaatgtgttaaaaaaggacatattttttaaaatctagattgcaaaagtaatactgtagcattgttgagttcagacattatagaaagtgaaagttccctatcatttgtttcccataaccaccttgaatagtttagtggatatattttattctaagcacatgctgtttatcttcttgaaaacaggatcatggcatagatatactcttttgtaatttctcttattagaaaagaagattaatcatatatcaaacacgattccatgtcactccatatagatctttccctcattctgtttttacagctataagggagtctgctgtgaaaatgctccttcgattagtttataactgagtgtaaaatttggcatttcactcttgattatagtctttttctgtatattcacccccaattctttgagaatgaggagtaccctaattttgtaagcaaaattttggggggctttggggtgaaaactaatttaaatgcttattttctcagttgcctacctccatttaaaaatcagttttgagggctataaaaaaaccttatgatattaaggcctttttttctgtataaaaataacatacaatttattttttccatttattcaaaagactgaattacactagccaagaaatgatcagtctcgtgtaaaagaataacacacgttctccttgaatcaagactactctgagattcagaaatgccagtagcggagggtggggtgtgaccccttaagtaagtgtgactagttaaaggtgtatggatattctttgtggaaagcgggctgccagatacaatttcaggctgtttcatattacttcacacggtgctttcaaactgtttattttctctcttggcactagtgagtacagctcataactggccagataatatctaagtctaggaccaggacagtgaatgggttttaccatgatttgatcaaaagtaaacaagaaaacaaaagcagaggaaaaaaaaaaaaagagaaggcatcacatttttctcattgtggggctaaaatgctgcatgttgaattttcactttctgattagaacccacagttgaacagatctgatttatttttttggggtcaggaagaaactgtcaaattttagtttgactgttcttttctttaggtctcccccctttcttcccctaccttttttttttttttaagcattactatattaatcagatagcagccactgtttgacatgtccttctgtggtggctgcagattaagtctgaaccgtgccagaaatctcgttgcattttttgatgtagcagaaatgaacctggttcattccatcttaacagctttagccaaatggctcagaagggatctacccgatttcataaagaagagttaatgtgcagtctggtttaatacaggtgcccttaaaatacatttttgttttgttttgttttctcacttccaagtttaacatgtccatggacattggctttagtttccccaagatgagtccatgaatgaccttgttccagtatcccttgctgatttgagttcccaagtaataagcctgggaatgttttcagtgcagcagccgggagaagaagggggattcagcagttgctgttcaatgcatttactctctacctgctggcttcaaacagtattaactttatgtgctccttgtgcattgtgtttaattaaaagcagttctcttcacagaggcacttgtaggatttttttttttttttttttttgccctgaaacgaataaaacaaataggcgtctggtatttgttttgtataacacaatccccataaaatgaagagtaataaaacataattatctgtaaaggcttgttttataagcctgagaatgggcttgtttctaccaggtttttatgttcattcataggagaaagaatctctttgtacattaatatgtaacaacaataagaacaaatgcttcccaattacatgcatgaatcaaacttatcttttattaaaaaattttttttctgttgtagtaaaagtttgtcattaaattctttctgtgtaaacacattagattgaaggaaaatgttttccttcaatattctgttcaactggcataactttatgatttttttctccccagcataattaaagaaacaactttatggttggttattgacttttttaggtcagagagcactctgtggattctaaaaccgccttccagaaaagtacacatcaaacttctacgtacgtttttatagggtttgtagagctctgatccttggttaaagatccctgacaatgtctaatagctgttttgaaaactgtacctccaatctgaagctaaggttttagttttagttttagtatgtgaatatctgatgaaacgattcaatggttttgtagcattggattcaatttcagggttgggctcctttctaggaatagaggaatattcttatctcaggaaaaaaaattcagagtgtgggaagtacgaaaattattaattcaaaggtgtatttgctgtcagattggatggcagtacccacatccctaggggctcctgttcccaagactgttttcattgtttctatccagcgctgggcacgagccttgaagtggcgaattcatcctctgaagttgtgtgtccattgctgcaagaataaaagaagcagtaacagaatcatgcagcgcagtatttcatggtgacagttttatgtggttgtgtgatgttgcagagtcttgtaggtgatatctacccttttcttttgaatcaaaacacggggttttactggaggagggaagtttcagaaacaacctagtctaacacaaaattaagctcctaaatagttatcccattctgtctactacaaaactaattgcttacaggaagtagaagtacacatatctaatatttatatcctgtttgagtagtggtttctaattttagatttctaacccctttttacattatctttttgcattgaaattatactgaaacattcatattattatgaatgcaagctgaattaaatagaccaagattctcggtttctcccttcatgttgtcatctactagagaatgaacagcttaaaataagtgcatcagttcctcatccaaagggaagctgaatattccaattcaagatcactttgcgtgcttactggaaataccatttttgaacgtacttggcaacttaaagtgcccaattaaaagctctgttgaaagaggaagtctgtggatgtgcaattagtccttaggattcagagcatttcctttatgtgtggaaggccataatatgaaatcactggtcacaatagctttatgccaggtgcttagactagaaggcattttcaggatggattatttctgtactcttgctcctaaaatggtttacctaaagaggctcccaagtccataaaaatactggtgatgtcaagaaattttggaggtggcctttcacaaattttaggcagtcaataaatataactagccatgtacgtgataggcaatacacaagacttgcttatattcctagactttctattttatctgattgacagtgttcctcttcccacctttttattcatttatttatttttaaaagatgaggattgggtaccagaaaattagccagtattgtgtgcttttccttactaaaaaaatgaggcctcgctgagtagggccagatgagctgtatattctgagattatttatagtgtttatgatagagagaccaaaaacagtaagcacttaatagctttccttatttacaagtcagattcatctaagggatatttttcttttatttttctggtgcttgaaatgttcctttaaaatagattatcagaggatacacagtgacacaaaatttgttgcttgtgaaaatgcagagtggattaagcttttctttttcaaggctctgcaacaaaacaggtacatttttatttcagtaaaaacactgctttttttttttgcctccgtcacacacacgagtaacataggatagatatgtgtatgtgaacatgtggctcttgttcccagttgtgtaatggatgcattcccttaaagtttgcagtaaagtgaatgtttattaagcaaattgtttttccccagtgacttctactgtaaaaatggcattgtctttcagtaggctctgaatatagtatgttcccatattctttggtaagatgaccaatcaaccaaaaaaaaa

SEQ ID NO: 422 - DNA, 4733 bp, Homo sapien
accaaagactgtaaaagagagccggtaggcacaagtggtggctcatgccggtaaccccaacactctggggatgccaaggcaggaataccacttaagaccaggtttttggttgacacttctctgcagaatagcacctggcacctctcaccaccactgaaaaggatggaattttatacacctctttttcctaggttctctctagcagttaccaagggaccatcggaggtacttattgtggctgtttacaaaagccttgcctccagtctgagtcacctcaccctactctctgcttcttccttttagctactctttttttcagtaaccctccctctttcctctgaaggcttgtgcttgcacacacaggcagacatactcatgcacgcgcacaccacacatgcttcctgtcctctggctctcccgtatcctatgtaaaacctcctactgtcatttaagtgaaacccttctagcacataagagttttcatctcagaagctcaattttacctttcacttttcagatagagaacacccaaggtttttaataatctggcgaatgtgttaaaaaaggacatattttttaaaatctagattgcaaaagtaatactgtagcattgttgagttcagacattatagaaagtgaaagttccctatcatttgtttcccataaccaccttgaatagtttagtggatatattttattctaagcacatgctgtttatcttcttgaaaacaggatcatggcatagatatactcttttgtaatttctcttattagaaaagaagattaatcatatatcaaacacgattccatgtcactccatatagatctttccctcattctgtttttacagctataagggagtctgctgtgaaaatgctccttcgattagtttataactgagtgtaaaatttggcatttcactcttgattatagtctttttctgtatattcacccccaattctttgagaatgaggagtaccctaattttgtaagcaaaattttggggggctttggggtgaaaactaatttaaatgcttattttctcagttgcctacctccatttaaaaatcagttttgagggctataaaaaaaccttatgatattaaggcctttttttctgtataaaaataacatacaatttattttttccatttattcaaaagactgaattacactagccaagaaatgatcagtctcgtgtaaaagaataacacacgttctccttgaatcaagactactctgagattcagaaatgccagtagcggagggtggggtgtgaccccttaagtaagtgtgactagttaaaggtgtatggatattctttgtggaaagcgggctgccagatacaatttcaggctgtttcatattacttcacacggtgctttcaaactgtttattttctctcttggcactagtgagtacagctcataactggccagataatatctaagtctaggaccaggacagtgaatgggttttaccatgatttgatcaaaagtaaacaagaaaacaaaagcagaggaaaaaaaaaaaaagagaaggcatcacatttttctcattgtggggctaaaatgctgcatgttgaattttcactttctgattagaacccacagttgaacagatctgatttatttttttggggtcaggaagaaactgtcaaattttagtttgactgttcttttctttaggtctcccccctttcttcccctaccttttttttttttttaagcattactatattaatcagatagcagccactgtttgacatgtccttctgtggtggctgcagattaagtctgaaccgtgccagaaatctcgttgcattttttgatgtagcagaaatgaacctggttcattccatcttaacagctttagccaaatggctcagaagggatctacccgatttcataaagaagagttaatgtgcagtctggtttaatacaggtgcccttaaaatacatttttgttttgttttgttttctcacttccaagtttaacatgtccatggacattggctttagtttccccaagatgagtccatgaatgaccttgttccagtatcccttgctgatttgagttcccaagtaataagcctgggaatgttttcagtgcagcagccgggagaagaagggggattcagcagttgctgttcaatgcatttactctctacctgctggcttcaaacagtattaactttatgtgctccttgtgcattgtgtttaattaaaagcagttctcttcacagaggcacttgtaggatttttttttttttttttttttgccctgaaacgaataaaacaaataggcgtctggtatttgttttgtataacacaatccccataaaatgaagagtaataaaacataattatctgtaaaggcttgttttataagcctgagaatgggcttgtttctaccaggtttttatgttcattcataggagaaagaatctctttgtacattaatatgtaacaacaataagaacaaatgcttcccaattacatgcatgaatcaaacttatcttttattaaaaaattttttttctgttgtagtaaaagtttgtcattaaattctttctgtgtaaacacattagattgaaggaaaatgttttccttcaatattctgttcaactggcataactttatgatttttttctccccagcataattaaagaaacaactttatggttggttattgacttttttaggtcagagagcactctgtggattctaaaaccgccttccagaaaagtacacatcaaacttctacgtacgtttttatagggtttgtagagctctgatccttggttaaagatccctgacaatgtctaatagctgttttgaaaactgtacctccaatctgaagctaaggttttagttttagttttagtatgtgaatatctgatgaaacgattcaatggttttgtagcattggattcaatttcagggttgggctcctttctaggaatagaggaatattcttatctcaggaaaaaaaattcagagtgtgggaagtacgaaaattattaattcaaaggtgtatttgctgtcagattggatggcagtacccacatccctaggggctcctgttcccaagactgttttcattgtttctatccagcgctgggcacgagccttgaagtggcgaattcatcctctgaagttgtgtgtccattgctgcaagaataaaagaagcagtaacagaatcatgcagcgcagtatttcatggtgacagttttatgtggttgtgtgatgttgcagagtcttgtaggtgatatctacccttttcttttgaatcaaaacacggggttttactggaggagggaagtttcagaaacaacctagtctaacacaaaattaagctcctaaatagttatcccattctgtctactacaaaactaattgcttacaggaagtagaagtacacatatctaatatttatatcctgtttgagtagtggtttctaattttagatttctaacccctttttacattatctttttgcattgaaattatactgaaacattcatattattatgaatgcaagctgaattaaatagaccaagattctcggtttctcccttcatgttgtcatctactagagaatgaacagcttaaaataagtgcatcagttcctcatccaaagggaagctgaatattccaattcaagatcactttgcgtgcttactggaaataccatttttgaacgtacttggcaacttaaagtgcccaattaaaagctctgttgaaagaggaagtctgtggatgtgcaattagtccttaggattcagagcatttcctttatgtgtggaaggccataatatgaaatcactggtcacaatagctttatgccaggtgcttagactagaaggcattttcaggatggattatttctgtactcttgctcctaaaatggtttacctaaagaggctcccaagtccataaaaatactggtgatgtcaagaaattttggaggtggcctttcacaaattttaggcagtcaataaatataactagccatgtacgtgataggcaatacacaagacttgcttatattcctagactttctattttatctgattgacagtgttcctcttcccacctttttattcatttatttatttttaaaagatgaggattgggtaccagaaaattagccagtattgtgtgcttttccttactaaaaaaatgaggcctcgctgagtagggccagatgagctgtatattctgagattatttatagtgtttatgatagagagaccaaaaacagtaagcacttaatagctttccttatttacaagtcagattcatctaagggatatttttcttttatttttctggtgcttgaaatgttcctttaaaatagattatcagaggatacacagtgacacaaaatttgttgcttgtgaaaatgcagagtggattaagcttttctttttcaaggctctgcaacaaaacaggtacatttttatttcagtaaaaacactgctttttttttttgcctccgtcacacacacgagtaacataggatagatatgtgtatgtgaacatgtggctcttgttcccagttgtgtaatggatgcattcccttaaagtttgcagtaaagtgaatgtttattaagcaaattgtttttccccagtgacttctactgtaaaaatggcattgtctttcagtaggctctgaatatagtatgttcccatattctttggtaagatgaccaatcaaccaaaaaaaaa

SEQ ID NO: 423 - DNA, 1445 bp, Homo sapien
atcagaacacagttatgacgtgagagtaggaatttcacagagagaacctagtatctaccaggagatcggtctcctaaatagttatcccattctgtctactacaaaactaattgcttacaggaagtagaagtacacatatctaatatttatatcctgtttgagtagtggtttctaattttagatttctaacccctttttacattatctttttgcattgaaattatactgaaacattcatattattatgaatgcaagctgaattaaatagaccaagattctcggtttctcccttcatgttgtcatctactagagaatgaacagcttaaaataagtgcatcagttcctcatccaaagggaagctgaatattccaattcaagatcactttgcgtgcttactggaaataccatttttgaacgtacttggcaacttaaagtgcccaattaaaagctctgttgaaagaggaagtctgtggatgtgcaattagtccttaggattcagagcatttcctttatgtgtggaaggccataatatgaaatcactggtcacaatagctttatgccaggtgcttagactagaaggcattttcaggatggattatttctgtactcttgctcctaaaatggtttacctaaagaggctcccaagtccataaaaatactggtgatgtcaagaaattttggaggtggcctttcacaaattttaggcagtcaataaatataactagccatgtacgtgataggcaatacacaagacttgcttatattcctagactttctattttatctgattgacagtgttcctcttcccacctttttattcatttatttatttttaaaagatgaggattgggtaccagaaaattagccagtattgtgtgcttttccttactaaaaaaatgaggcctcgctgagtagggccagatgagctgtatattctgagattatttatagtgtttatgatagagagaccaaaaacagtaagcacttaatagctttccttatttacaagtcagattcatctaagggatatttttcttttatttttctggtgcttgaaatgttcctttaaaatagattatcagaggatacacagtgacacaaaatttgttgcttgtgaaaatgcagagtggattaagcttttctttttcaaggctctgcaacaaaacaggtacatttttatttcagtaaaaacactgctttttttttttgcctccgtcacacacacgagtaacataggatagatatgtgtatgtgaacatgtggctcttgttcccagttgtgtaatggatgcattcccttaaagtttgcagtaaagtgaatgtttattaagcaaattgtttttccccagtgacttctactgtaaaaatggcattgtctttcagtaggctctgaatatagtatgttcccatattctttggtaagatgaccaatcaaccaaaaaaaaa

SEQ ID NO: 424 - DNA, 933 bp, Homo sapien
  misc_feature (913)..(913): n=a, c, g or t
  misc_feature (916)..(916): n=a, c, g or t
tgaccaggagcatggttgagaatgaccctccctggtcattctgcatcactgtgttactcctaaatagttggttcattcttagggccaaagaatccatataaatggtagtttcttgctcttcctcccacagatggatgcaggggtacctgcaccttaggcaggtggttgctccttcagtatctgtgtgttcctagcatctgggtcctcagatgggtgggcctggtagacagaacactgtgcagagcagaacttttctagatattgtccatgtgattggcacagtcagaaagatgtggggtttccaggacaggaggtcagatgtgccatgtcttctctcagtcctgatgtccctgctgattcctctggggcatggcgagtgacgaggacaccctctaacatacgttccatgagatgaaagcctgcagaacctgtgcctgcactaccatctgcctcctgggtggggatactattgggtgtcaggctgagagctaggccaccagttctcaaccaacctgtccccatggaaacctgaggcttcggggctaaggcaggacctccagcaggtacccagtgttgagaatatgtgttggtttctgtgttaggagttttatctcagtggagtcttggtaaaaagagggaatcaaaggcacgtgacattttcttctttctctggtaaagtgaggaatgaatgttgaccatttctttctgaagttccatacagaacatgtatactcagcctgaggagccaaggtgattccttagctgctcttggagaaggtgtcatctagtcttcacaaggagtcttcaggcacaagggcctgaacctgattactcgtggaaagcattgggcagagcttcacagtcccacctagagctgggctgtaattctagggacaaagtggaggagcaacancgnccttgtggggagcacac

SEQ ID NO: 425 - DNA, 1053 bp, Homo sapien
  misc_feature (1033)..(1033): n=a, c, g or t
  misc_feature (1036)..(1036): n=a, c, g or t
gaggccatcaactattcttgcttcatacaaacatttgcttacagatcctgaacacacacaccgccccccacccagtggtgtgttgctaactgcttaataaaatgctctccagggggaaataggaaagcctagaattgtgatgcttaagtggtgggtcattctgcatcactgtgttactcctaaatagttggttcattcttagggccaaagaatccatataaatggtagtttcttgctcttcctcccacagatggatgcaggggtacctgcaccttaggcaggtggttgctccttcagtatctgtgtgttcctagcatctgggtcctcagatgggtgggcctggtagacagaacactgtgcagagcagaacttttctagatattgtccatgtgattggcacagtcagaaagatgtggggtttccaggacaggaggtcagatgtgccatgtcttctctcagtcctgatgtccctgctgattcctctggggcatggcgagtgacgaggacaccctctaacatacgttccatgagatgaaagcctgcagaacctgtgcctgcactaccatctgcctcctgggtggggatactattgggtgtcaggctgagagctaggccaccagttctcaaccaacctgtccccatggaaacctgaggcttcggggctaaggcaggacctccagcaggtacccagtgttgagaatatgtgttggtttctgtgttaggagttttatctcagtggagtcttggtaaaaagagggaatcaaaggcacgtgacattttcttctttctctggtaaagtgaggaatgaatgttgaccatttctttctgaagttccatacagaacatgtatactcagcctgaggagccaaggtgattccttagctgctcttggagaaggtgtcatctagtcttcacaaggagtcttcaggcacaagggcctgaacctgattactcgtggaaagcattgggcagagcttcacagtcccacctagagctgggctgtaattctagggacaaagtggaggagcaacancgnccttgtggggagcacac

SEQ ID NO: 426 - DNA, 894 bp, Homo sapien
tgaccagggagcatggttgagaatgaccctccctggtcattctgcatcactgtgttactcctaaataggtggttcattcttagggccaaagaatccatataaatggtagtttcttgctcttcctcccacagatggatgcaggggtacctgcaccttaggcaggtggttgctccttcagtatctgtgtgttcctagcatctgggtcctcagatgggtgggcctggtagacagaacactgtgcagagcagaacttttctagatattgtccgtgtgattggcacagtcagaaagatgtggggtttccaggacaggaggtcagatgtgccatgtcttctctcagtcctgatgtccctgctgattcctctggggcatggcgagtgacgaggacaccctctaacatacgttccatgagatgaaagcctgcagaacctgtgcctgcactaccatctgcctcctgggtggggatactattgggtgtcaggctgagagctaggccaccagttctcaaccaacctgtccccatggaaacctgaggcttcggggctaaggcaggacctccagcaggtacccagtgttgagaatatgtgttggtttctgtgttaggagttttatctcagtggagtcttggtaaaaagagggaatcaaaggcacgtgacattttcttctttctctggtaaagtgaggaatgaatgttgaccatttctttctgaagttccatacagaacatgtatactcagcctgaggagccaaggtgattccttagctgctcttggagaaggtgtcatctagtcttcacaaggagtcttcaggcacaagggcctgaatctgattactcgtggaaagcattgggctcactttatggaggtgtatcctcaggagtcagctatgacagat

SEQ ID NO: 427 - DNA, 574 bp, Homo sapien
caatcacacatttttagaagggggcaacttcatgtataatttggttttcttattgggtacatctgtcccattctaaacttttcatactttccagatattttttaaaaaatagatgaaactagggagaggaaatcttacacatatgtgaatcacacctggctttggctcagtttagaaccactttaggcctaggaatggggcctaaagacaatattttctttcagtggttaagaagggttgatagagagaggccttctgctgccagaactctcattagaaagcagccttgccaagtgctgcgtcctcctcagccacctcactaacccaagccctttaatagctgaggcctggagaggagacagcactgtcactgcctgctgatggcctctttcctggggtggaaatgctccgcatatacgtagctgggagggaaacagaaaagagagatgctagccccctgccttaaatactgtgaacttcttcgttgaaggaaagggagggttgggaatggtttattatttggcctctcaaaggtgtggaatacattattagcacgtgttttttggtgtccttg

SEQ ID NO: 428 - DNA, 573 bp, Homo sapien
caatcacacatttttagaagggggcaacttcatgtataatttggttttcttattgggtacatctgtcccattctaaacttttcatactttccagatattttttaaaaaatagatgaaactagggagaggaaatcttacacatatgtgaatcacacctggctttggctcagtttagaaccactttaggcctaggaatggggcctaaagacaatattttctttcagtggttaagaagggttgatagagagaggccttctgctgccagaactctcattagaaagcagccttgccaagtgctgcgtcctcctcagccacctcactaacccaagccctttaatagctgaggcctggagaggagacagcactgtcactgcctgctgatggcctctttcctggggtggaaatctccgcatatacgtagctgggagggaaacagaaaagagagatgctagccccctgccttaaatactgtgaacttcttcgttgaaggaaagggagggttgggaatggtttattatttggcctctcaaaggtgtggaatacattattagcacgtgttttttggtgtccttg

SEQ ID NO: 429 - DNA, 4944 bp, Homo sapien
gatggagtcttgctctgttgcccaggctggaatgcattggcgcgatctcggctcactgcaacctccaactcccagattccagcgattctcctgcctcagcctcctgagtagctgggattacaggcgcacgccaccacacctggctaatttttgtatttttagtagagacagggtttcaccatattggtcaggtttgtctcgaactcctgacctcaggtgatccacccgccttggcctcccaaagtgctgggattacaggcgtgagccaccgccctggccaggaatcctgatacctttgggaaccatggtgaatgacatctagacccttctgtcctgaagggagttggtggcccagactctagcagggactatgtctttgtctcctagggagtagaaactggagttactggatgtttagtcctccagggaggctggtagaagtcctgtttcctaattggtggggaggtgtccatgactgggacctgaactccagtataggggagggagacctgagcgccccagggagctggaactcttgggcttcagagcctcagagggaaacagggtctacatttctctgggagaaaaagcctgcacacaggtccccaaggagcagtgggctttgaatcttgatggggtggcggaggcccctggggtctgagacttccggggttctaagatggctgtggaccttggttcctaaatattgggtaaggggaggtctgcatctggaggagggatcgggggcttgtgcgagaaagctggagacttcttgatctctcctggggagtggatgggtttctataattgccctccaaaagcatgtagggagggtggtcccacaaaaatgaggtgaggtgaggtaagaggtctgggcatggtgggctctgggagtagccagggaccaggaatgaggtcttttgggtgtggaagggcagtaaagcatacctcagagacagctcctccaaaccttgtattgggatcccggcaactgcctctgtgagtgtgactgggaagggatatgactgccttcatcttctaggtgctgagcaattcaggtgatctctggggagtctgtttctctgtctcttttctttaggagtttctatctttttttggcctttttctcctggtatttaaccataaccctttatggccttggtgttttgtgcaccttccttttcagaagagcagctgtactgctgcactggtccaaacacttctgtatggacacctcgggtatccccaagaggctctgctttctgatgtacatagagggtgctgcattgagccaggggcccaccaaatgggtggtcaggcacttgagaccatgggaatatgccaggagtgaatgaagcaaaggcagaaaccacagtgcctggaatgttctaggctgctagccacatgtgggggaaaagttgcaggttacagaattcttcagtgtcaaaaacagaaaaggaggatctgagaatccaagcgatagaatcccttttgtcgtagacagaaagaggaaagtccagagagggcaggcttgaggcccaacagcacacagtaaggccctgtgggtctggcccttgcctattctcattcactgccccttcccactcctgtccagcctgatagactttccttctttttttttttgaaatggagtctcaccttgtcacccagtctggagtacagggatgtgatgactgtagctgagatgacaggcatgtgccaccacacctggctaatttttgtagtttagtagagaagggatttcaccctgttggtcaggctggtctcgaactcctgacctcagctcccacgtgggacaagatggtgtcttcggcgcagatgggcttcaacctgcaggctctcctggagcagctcagccaggatgagttgagcaagttcaagtatctgatcacgaccttctccctggcacacgagctccagaagatcccccacaaggaggtagacaaggctgatgggaagcaactggtagaaatcctcaccacccattgtgacagctactgggtggagatggcgagcctccaggtctttgaaaagatgcaccgaatggatctgtctgagagagcaaaggatgaagtcagagaagcagctttgaaatcctttaataaaaggaagcctctatcattagggataacacggaaagaacgaccacctctagacgtggacgaaatgctggagcgcttcaaaacagaagcacaagacaaagacaataggtgcaggtatatattgaagacgaagttccgggagatgtggaagagctggcctggagatagcaaagaggtccaggttatggctgagagatacaagatgctgatcccattcagcaaccccagggtgcttcccgggcccttctcatacacggtggtgctgtatggtcctgcaggccttgggaaaaccacgctggcccagaaactaatgctagactgggcagaggacaacctcatccacaaattcaaatatgcgttctacctcagctgcagggagctcagccgcctgggcccgtgcagttttgcagagctggtcttcagggactggcctgaattgcaggatgacattccacacatcctagcccaagcacggaaaatcttgttcgtgattgacggctttgatgagctgggagccgcacctggggcgctgatcgaggacatctgcggggactgggagaagaagaagccggtgcccgtcctcctggggagtttgctgaacagggtgatgttacccaaggccgccctgctggtcaccacgcggcccagggccctgagggacctccggatcctggcggaggagccgatctacataagggtggagggcttcctggaggaggacaggagggcctatttcctgagacactttggagacgaggaccaagccatgcgtgcctttgagctaatgaggagcaacgcggccctgttccagctgggctcggcccccgcggtgtgctggatcgtgtgcacgactctgaagctgcagatggagaagggggaggacccggtccccacctgcctcacccgcacggggctgttcctgcgtttcctctgcagccggttcccgcagggcgcacagctgcggggcgcgctgcggacgctgagcctcctggccgcgcagggcctgtgggcgcagacgtccgtgcttcaccgagaggatctggaaaggctcggggtgcaggagtccgacctccgtctgttcctggacggagacatcctccgccaggacagagtctccaaaggctgctactccttcatccacctcagcttccagcagtttctcactgccctgttctacaccctggagaaggaggaggaagaggatagggacggccacacctgggacattggggacgtacagaagctgctttccggagtagaaagactcaggaaccccgacctgatccaagcaggctactactcctttggcctcgctaacgagaagagagccaaggagttggaggccacttttggctgccggatgtcaccggacatcaaacaggaattgctgcgatgcgacataagttgtaagggtggacattcaacggtgacagacctgcaggagctcctcggctgtctgtacgagtctcaggaggaggagctggtgaaggaggtgatggctcagttcaaagaaatatccctgcacttaaatgcagtagacgttgtgccatcttcattctgcgtcaagcactgtcgaaacctgcagaaaatgtcactgcaggtaataaaggagaatctcccggagaatgtcactgcgtctgaatcagacgccgaggttgagagatcccaggatgatcagcacatgcttcctttctggacggacctttgttccatatttggatcaaataaggatctgatgggtctagcaatcaatgatagctttctcagtgcctccctagtaaggatcctgtgtgaacaaatagcctctgacacctgtcatctccagagagtggtgttcaaaaacatttccccagctgatgctcatcggaacctctgcctagctcttcgaggtcacaagactgtaacgtatctgacccttcaaggcaatgaccaggatgatatgtttcccgcattgtgtgaggtcttgagacatccagaatgtaacctgcgatatctcgggttggtgtcttgttccgctaccactcagcagtgggctgatctctccttggcccttgaagtcaaccagtccctgacgtgcgtaaacctctccgacaatgagcttctggatgagggtgctaagttgctgtacacaactttgagacaccccaagtgctttctgcagaggttgtcgttggaaaactgtcaccttacagaagccaattgcaaggaccttgctgctgtgttggttgtcagccgggagctgacacacctgtgcttggccaagaaccccattgggaatacaggggtgaagtttctgtgtgagggcttgaggtaccccgagtgtaaactgcagaccttggtgctttggaactgcgacataactagcgatggctgctgcgatctcacaaagcttctccaagaaaaatcaagcctgttgtgtttggatctggggctgaatcacataggagttaagggaatgaagttcctgtgtgaggctttgaggaaaccactgtgcaacttgagatgtctgtggttgtggggatgttccatccctccgttcagttgtgaagacctctgctctgccctcagctgcaaccagagcctcgtcactctggacctgggtcagaatcccttggggtctagtggagtgaagatgctgtttgaaaccttgacatgttccagtggcaccctccggacactcaggttgaaaatcgatgactttaatgatgaactcaataagctgctggaagaaatagaagaaaaaaacccacaactgattattgatactgagaaacatcatccctgggcagaaaggccttcttctcatgacttcatgatctga

SEQ ID NO: 430 - DNA, 396 bp, Homo sapien
aaaaacttattagagctttctcaacctgcagccctcatctccgccggcgagtagggccaggtgttgggagctcccacgtgggacaagatggtgtcttcggcgcagatgggcttcaacctgcaggctctcctggagcagctcagccaggatgagttgagcaagttcaagtatctgatcacgaccttctccctggcacacgagctccagaagatcccccacaaggaggtagacaaggctgatgggaagcaactggtagaaatcctcaccacccattgtgacagctactgggtggagatggcgagcctccaggtctttgaaaagatgcaccgaatggatctgtctgagagagcaaaggatgaagtcagagaagcaagcaagcctttgaaaaccctttaa

SEQ ID NO: 431 - DNA, 1594 bp, Homo sapien
agattgactaagttctgtatttccagctgattcctgggcgatgttggtgccactggtctgaccaccctttgacaactgctgctccagataattcaagtcggggtataacacaaccagtgagatgtaaaccaaagacgattccacggttagattctcaagaatgacttgttctgccgggcgcggtggctcacgcctgtcatcccagcactctgggaggccgaggttggtgtcttgttccgctaccactcagcagtgggctgatctctccttggcccttgaagtcaaccagtccctgacgtgcgtaaacctctccgacaatgagcttctggatgagggtgctaagttgctgtacacaactttgagacaccccaagtgctttctgcagaggttgtcgtaagtctctcctctcttacagagcagctgtgctttcgatctggggccacagacgagcaatggtcatgcctgacttggctgtatggaacctctcgctgatgtgaacacctgttcccatgtttagatccaggccgatggcctgtgaattttgttcttctctcattcctattccttcataggatcaccagtgcatgatagaaggtggggagttcacaagaaggggcttttggatgctggcacttgtggagctagccgggaaggttgaagttggacctgtcaaccgtgttgccatttgtgattcttttgtaggttggaaaactgtcaccttacagaagccaattgcaaggaccttgctgctgtgttggttgtcagccgggagctgacacacctgtgcttggccaagaaccccattgggaatacaggggtgaagtttctgtgtgagggcttgaggtaccccgagtgtaaactgcagaccttggtgctttggaactgcgacataactagcgatggctgctgcgatctcacaaagcttctccaagaaaaatcaagcctgttgtgtttggatctggggctgaatcacataggagttaagggaatgaagttcctgtgtgaggctttgaggaaaccactgtgcaacttgagatgtctgtggttgtggggatgttccatccctccgttcagttgtgaagacctctgctctgccctcagctgcaaccagagcctcgtcactctggacctgggtcagaatcccttggggtctagtggagtgaagatgctgtttgaaaccttgacatgttccagtggcaccctccggacactcaggttgaaaatcgatgactttaatgatgaactcaataagctgctggaagaaatagaagaaaaaaacccacaactgattattgatactgagaaacatcatccctgggcagaaaggccttcttctcatgacttcatgatctgaatccccccgagtcattcattctccatgaagtcatcgattttccaggtgttggtgaactgcctgtgactcctctcctccccggcccctacccctcagggataatgagttcattgctgggctagatgttttagccatgattctgcctctgttttatacctgcacacatccttatctttgttacatatgaaatatctgtatcacgggtatattgagagaaataaaggtgagagcattcacaaa

SEQ ID NO: 432 - DNA, 1482 bp, Homo sapien
cctcctccccactgccccctgcagcccctgagatattttgctcactatccctccccacttgcttccctgatatgtgctctgagcttccctgaaccaggatctgcctattactgctgtgccccatggggggctccttccctgcctgacccactgttgcagaatgaagtcacctcgcccccctcttcctttaatcttcaggcctcactggcctgtcctgctcagcttgggccagtgacaatctgcaaggctgaacaacagcccctggggttgaggcccctgtggctcctggtcaggctgcccgttgtggggaggggcagtgttagagcagggctggtcataccctctggagttcagaggaagaggtaggaccagtgcttttttgtttcttttgttatttttggttgggtgggtgggaaggggttggtgtcttgttccgctaccactcagcagtgggctgatctctccttggcccttgaagtcaaccagtccctgacgtgcgtaaacctctccgacaatgagcttctggatgagggtgctaagttgctgtacacaactttgagacaccccaagtgctttctgcagaggttgtcgttggaaaactgtcaccttacagaagccaattgcaaggaccttgctgctgtgttggttgtcagccgggagctgacacacctgtgcttggccaagaaccccattgggaatacaggggtgaagtttctgtgtgagggcttgaggtaccccgagtgtaaactgcagaccttggtgctttggaactgcgacataactagcgatggctgctgcgatctcacaaagcttctccaagaaaaatcaagcctgttgtgtttggatctggggctgaatcacataggagttaagggaatgaagttcctgtgtgaggctttgaggaaaccactgtgcaacttgagatgtctgtggttgtggggatgttccatccctccgttcagttgtgaagacctctgctctgccctcagctgcaaccagagcctcgtcactctggacctgggtcagaatcccttggggtctagtggagtgaagatgctgtttgaaaccttgacatgttccagtggcaccctccggacactcaggttgaaaatcgatgactttaatgatgaactcaataagctgctggaagaaatagaagaaaaaaacccacaactgattattgatactgagaaacatcatccctgggcagaaaggccttcttctcatgacttcatgatctgaatccccccgagtcattcattctccatgaagtcatcgattttccaggtgttggtgaactgcctgtgactcctctcctccccggcccctacccctcagggataatgagttcattgctgggctagatgttttagccatgattctgcctctgttttatacctgcacacatccttatctttgttacatatgaaatatctgtatcacgggtatattgagagaaataaaggtgagagcattcacaaa

SEQ ID NO: 433 - DNA, 1752 bp, Homo sapien
aaaaacttattagagctttctcaacctgcagccctcatctccgccggcgagtagggccaggtgttgggagctcccacgtgggacaagatggtgtcttcggcgcagatgggcttcaacctgcaggctctcctggagcagctcagccaggatgagttgagcaagttcaagtatctgatcacgaccttctccctggcacacgagctccagaagatcccccacaaggaggtagacaaggctgatgggaagcaactggtagaaatcctcaccacccattgtgacagctactgggtggagatggcgagcctccaggtctttgaaaagatgcaccgaatggatctgtctgagagagcaaaggatgaagtcagagaagcagctttgaaatcctttaataaaaggaagcctctatcattagggataacacggaaagaacgaccacctctagacgtggacgaaatgctggagcgcttcaaaacagaagcacaagcgtttacagaaacgaaaggaaatgtcatctgcctgggtaaagaagtctttaaaggaaaaaagccagacaaagacaataggtgcaggtatatattgaagacgaagttccgggagatgtggaagagctggcctggagatagcaaagaggtccaggttatggctgagagatacaagatgctgatcccattcagcaaccccagggtgcttcccgggcccttctcatacacggtggtgctgtatggtcctgcaggccttgggaaaaccacgctggcccagaaactaatgctagactgggcagaggacaacctcatccacaaattcaaatatgcgttctacctcagctgcagggagctcagccgcctgggcccgtgcagttttgcagagctggtcttcagggactggcctgaattgcaggatgacattccacacatcctagcccaagcacggaaaatcttgttcgtgattgacggctttgatgagctgggagccgcacctggggcgctgatcgaggacatctgcggggactgggagaagaagaagccggtgcccgtcctcctggggagtttgctgaacagggtgatgttacccaaggccgccctgctggtcaccacgcggcccagggccctgagggacctccggatcctggcggaggagccgatctacataagggtggagggcttcctggaggaggacaggagggcctatttcctgagacactttggagacgaggaccaagccatgcgtgcctttgagctaatgaggagcaacgcggccctgttccagctgggctcggcccccgcggtgtgctggatcgtgtgcacgactctgaagctgcagatggagaagggggaggacccggtccccacctgcctcacccgcacggggctgttcctgcgtttcctctgcagccggttcccgcagggcgcacagctgcggggcgcgctgcggacgctgagcctcctggccgcgcagggcctgtgggcgcagacgtccgtgcttcaccgagaggatctggaaaggctcggggtgcaggagtccgacctccgtctgttcctggacggagacatcctccgccaggacagagtctccaaggcggaakcctatcactcaggtccagagttttccatggccggtctaacctggggaacgagggcgagcgggttttgggggcccctgggatgggggttcgaagtgtcgggaagatggaatcaagtaaaagggaaaccggggcaaaaaggagggggccaggggggaggaaaagtggggggg

SEQ ID NO: 434 - DNA, 760 bp, Homo sapien
  misc_feature (598)..(598): n=a, c, g or t
  misc_feature (602)..(602): n=a, c, g or t
  misc_feature (617)..(617): n=a, c, g or t
  misc_feature (627)..(628): n=a, c, g or t
  misc_feature (665)..(665): n=a, c, g or t
  misc_feature (727)..(727): n=a, c, g or t
  misc_feature (749)..(749): n=a, c, g or t
cacaaccactacccttctgctcccccatggcgccttcctgaacactttcccaaaacagggatggaagagccaggaaagggacatccacagggtcctgggcacttctagagagaacaggttcagggaggaggtgatgctgaagccaacgtctaaagatgagcaggaagaagccaggcgttaaatgctgtcctcgtgctgagacatccagattcactgctcccctgacctccagacctgcgggaagtccacctcccatctgcctacaccctctgctctcaggcaactccagcacagccagcagagcctggcatggagaggacacgcactgagcctgagatgaataggaggttagtgagggcggcagcggcagaacaaaggagactggcacacgtgaaaccctcgcgtaaggcgggcatgacactcacagactgatgagccaaaacaaggccaataactaaacccacctcccaggactgtggtgaagatggaatgagaccaagaagccagaggctgggcacggcacctgcacgtggtacttgcagtcgcccctcccaggatgtggtttcaggagctcacacctcaggcagccctggagggnaganggaggcaatgagcancaaactttgnncaccgtgtgattcagcttgaagtggatctcccatcantcaagccttcagatgagcccacagttgcagccaattctgtgatgagcctgtgagagcccacnagctacaggatgcagccaagcnacacccggatt

SEQ ID NO: 435 - DNA, 1584 bp, Homo sapien
tttagccaggatggtctggatctcctgacctcgtgatccacccgcctaggcctcccaaagtgctgggattacaggtgtaagccaccacgcccggcccwgaggctctcttaaacagtgcttagggtccaacgtctatgggtcaaacctcagctccctcaatgtggagcacagtgacttaatttccccaactgtcagactcatgcacctgtagggggatgaaaccaaagggacccacctcatcaggagaatgaaatgggacagccccttagcttagtccctggcagctggcaagcactgtctaagtgttcccttttattatcatatttaagtacaggatagagggggatttctcagcctcagcactactgacatgttgggtgagatcatttttcatggggtgtggaggcctgtcctgtgcatagcaggatgggcagcagcatccctgacctctgcccactccctccctcccaggctatgacagccaacagtgtctccatacattgccaaatgtcccttggagcccaaatgccccagttaagaaacattgatacgcaacagccagatctctattgcctatgagtctaaatgacttacaattctatcatcctgtgacttcccgtaggcacaatgtggcatgtccaagaattctaagtgccgcttctatcaaactagctcctcctgtgttcccacttcggtgtccacagctaggtgcccaaggcaggatgttgggagccccctggactcttcctctccctcacctttacactgaccccagtctccctggtgggcccatccgttctcaggcgttaaatgctgtcctcgtgctgagacatccagattcactgctcccctgacctccagacctgcgggaagtccacctcccatctgcctacaccctctgctctcaggtgagggcaactccatcttctggttactcaagttgaaaccggacacatccttgctccactctctctcacctctcctatccattcctctcagcaaattctagtagcttctccttcagaacatagctgcaatctggtcacttctcactgctcacctggtctgggccaccaccactcctcatctagagtgctgtacagtctccaggctccttcctttatcccgacaatctattctcagttgagcagccacagagacctggtagaggcctgaaccagctccccaacccctgctcaacatcccccagcaggcccctcttggcaaaggcctcgcagtgagcctgaaggcccctcacccctactcctgcgacgtcatctctggctcccctcccctttgcttttgccagttctcaagcacacccggcatgctcctgcttcacggtttttggacctgctgttcccttgctcctgctgtggcccagaaagctgtccttgcagcactggcccccttcaggtctttcttcagatattaccttcttggggaatctttcctgaccaccctatttaaggctcaccatgcatcacccaccacaccccatgttccttcttggcctgaattttttcatagcactgattgcaatcaatacactctgtatgtattttatgtgtttacatgacatgc

SEQ ID NO: 436 - DNA, 760 bp, Homo sapien
cacaaccactacccttctgctcccccatggcgccttcctgaacactttcccaaaacagggatggaagagccaggaaagggacatccacagggtcctgggcacttctagagagaacaggttcagggaggaggtgatgctgaagccaacgtctaaagatgagcaggaagaagccaggcgttaaatgctgtcctcgtgctgagacatccagattcactgctcccctgacctccagacctgcgggaagtccacctcccatctgcctacaccctctgctctcaggcaactccagcacagccagcagagcctggcatggagaggacacgcactgagcctgagatgaataggaggttagtgagggcggcagcggcagaacaaaggagactggcacacgtgaaaccctcgcgtaaggcgggcatgacactcacagactgatgagccaaaacaaggccaataactaaacccacctcccaggactgtggtgaagatggaatgagaccaagaagccagaggctgggcacggcacctgcacgtggtacttgcagtcgcccctcccaggatgtggtttcaggagctcacacctcaggcagccctggagggcagagggaggcaatgagcaccaaactttgctcaccgtgtgattcagcttgaagtggatctcccatcagtcaagccttcagatgagcccacagttgcagccaattctgtgatgagcctgtgagagcccccaagctacaggatgcagccaagccacacccggatt

SEQ ID NO: 437 - DNA, 1069 bp, Homo sapien
  misc_feature (613)..(665): n=a, c, g or t
acagaaaaaaagaaataaaatatacacgtaccaatttggcataaataaatcctacctaaccagtaatgagacttaaaatgaatgaactaaacatttcaatcaaaaggcagagattggaagattagtttaaaaaacatatgatccaactagatgttggataaatgaaacaaaatttactttcaaagacacaaataagtaaggattaaaaaagatgtaccattcataaaatgcccaaaagagagttggaatggttatactatatgatgtgttttgtttttgttttcaatgaaattatacatgctaatgctcacaaattatacaaaaatttatagcatgcagctgaagcagtgctcagaaggagattttacaggcctatttttaaaaagaagaaagatggcaaatcaataatgcagccttcaatcttatgaatttttttaaataaaaaaacatactaaacctggagcatgtatgagtaataatacatactaatacatattaatacacaaggaacaagcattagggttcttcagaaagatagaaacagtaggatatatacagagagatggatagatatttgagagaagatgaattagggaaactggcttataccagnnnnnnnnnnnnnnnnnnnnnnnnnnnnnnnnnnnnnnnnnnnnnnnnnnnnntgatctactacacccaatagagtactaagaatggtgtttggagaatgagtatgccaacaaatgttgttacaatttaacctacaaaaactggagcctgaatatagacagaagtattgtcaaatggatttttgagcagacaaagaatgaattccttccattaacattgtatcatttgactcctggaaaattttttaaaacatatttatgaatatttcttaaatactggccttagaacatgattgagggtctttcttccctccagttcccacacagagtcctttgcttatcactgactagcagactcttcatttataaattgttgacatctactttctagaagataaactgatcatttgttgttgtcaaacgataagcctcaaactataagaaagaaaaaggaaagg

SEQ ID NO: 438 - DNA, 612 bp, Homo sapien
acagaaaaaaagaaataaaatatacacgtaccaatttggcataaataaatcctacctaaccagtaatgagacttaaaatgaatgaactaaacatttcaatcaaaaggcagagattggaagattagtttaaaaaacatatgatccaactagatgttggataaatgaaacaaaatttactttcaaagacacaaataagtaaggattaaaaaagatgtaccattcataaaatgcccaaaagagagttggaatggttatactatatgatgtgttttgtttttgttttcaatgaaattataaatgaaaatgaaaacaaattatacaaaaatttatagaatgcagctgaagcagtgctcagaaggagattttacaggcctatttttaaaaagaagaaagatggcaaatcaataatgcagccttcaatcttatgaatttttttaaataaaaaaacatactaaacctggagcatgtatgagtaataatacatactaatacatattaatacacaaggaacaagcattagggttcttcagaaagatagaaacagtaggatatatacagagagatggatagatatttgagagaagatgaattagggaaactggcttataccag

SEQ ID NO: 439 - DNA, 698 bp, Homo sapien
ttgggtggtgacacaaagccaaaccatatcagtaatcaaaatgcccagggaagcattatgccaaatttacaaatcctcttctaagtttagatttcttctttgccccaattcagcactcactgctttgagcttgaagcctaaagggaagaacaaataagatctgcttcttctctgtttatgctgcctacactcacccaatgacagctgattttgacccttccagggccaacgtgtgggaagagaagttagagagcacagttttacacaacaagtaggaattttagtgtcactggggttatctgtgtttggtgggtgattacaggctgctcttcctctagtgggatactttggtgagattcatggagatactttactgagagcctctaactgtaatcctgtaatgctgtaatgcagtagacacctctcttctctctggacatgaccgtgaccctctgcttctggacttccgctgactgaccctacacagattctgttggatcacaatactctctaggttgtcctcttagctggagccagtttttaaaagaaagaaacttttattgataaatattttcagaaaagcactcaaagatgtagagcttatcagtaggtaaatgaaacgatgttattatcacccagaccaaaaaatttaaagatcattaggttcccagaagctccattttgccccttccaatcat

SEQ ID NO: 440 - DNA, 698 bp, Homo sapien; identical to SEQ ID NO: 439

SEQ ID NO: 441 - DNA, 625 bp, Homo sapien
ggggggtctctttgagatagtagcagttgagcagcttgaagatagcaggggagttagttcatgggcttccaggcagagggagcagccagtgccagcaccaacgtgggagtgtgcctggagactctaaggaacagaatgtgcagcaggactggggcacagtggtggggaggccagaggggctgcgggtgtgggccgggcaggtggaggaggccttgagggctgttgagaggactgggctcttgctattacttttagccatatgggagtcattgcaatcctttgagctgaggggtagctcgttctgattttcattctgaaaagacccgtctggccactgtgttgagaatagatgttcctggtaaacaggggtgggcagggagaacagctcccctgcaccagctcccgctgggctgcagacaggctctgatgtggcttgcagcacggtggcagcagggggaggtggcaccgagcagcaggaccctggatatttttttggacatagagccaggaggatttcctcatggttctgatgagggttgagagagagaaggggagtccggatcatcccaaggtttctggcagacagatgatgtttcccagctaaatgggagcggtcctggaagag

SEQ ID NO: 442 - DNA, 628 bp, Homo sapien
gagtgggtctctttgagatagtagcagttgagcagcttgaagatagcaggggagttagttcatgggcttccaggcagagggagcagccagtgccagcaccaacgtgggagtgtgcctggagactctaaggaacagagtgtgcagcaggactggggcacagtggtggggaggccagaggggctgcgggtgtgggccgggcaggtggaggaggccttgagggctgttgagaggactgggctcttgctattacttttagccatatgggagtcattgcaatcctttgagctgaggggtagctcgttctgattttcattctgaaaagacccgtctggccactgtgttgagaatagatgttcctggtaaacaggggtgggcagggagaacagctcccctgcaccagctcccgctgggctgcagacaggctctgatgtggcttgcagcacggtggcagcagggggaggtggcaccgagcagcaggaccctggatatttttttggacatagagccaggaggatttcctcatggttctgatgagggttgagagagagaaggggagtccggatcatcccaaggtttctggcagacagatgatgtttcaccagctaagatggagcggtcctggaaagag

SEQ ID NO: 443 - DNA, 548 bp, Homo sapien
ctagaaagatttgcaattcatttatagaattgctagaactaaataatggcagatttttcaaagttatgtaatagactactctggattataaaatactaaagctatcagttgggttctgccttgattctattaaatttcccggtaatgactgtactaaaactcatggggaactgcaagataactttattgatggccatagaggatgaaaacaatgcataaggtatggaattaattttaagccacacactgaatagacagtgatgtaaagtaaaatgatatttttcaaggaaagacaattatgtcacattataatccagtttacataaatagcatactattaaaaaaagctaagtcttcagagcatgtaattcaggactgttgtgaaacctcttactcttgttggttagttattttgtgctgtaagggagggaaaatggcttcctccctacttctaggttctttggctgggatacaaattaaattgacataaaacagattaacaggagaaaaaaacatttttggccaggctcggtggctcatgcctgtga

SEQ ID NO: 444 - DNA, 675 bp, Homo sapien
tgagccaccgccctggccaggaatcctgatacctttgggaaccatggtgaatgacatctagacccttctgtcctgaagggagttggtggcccagactctagcagggactatgtctttgtctcctagggagtagaaactggagttactggatgtttagtcctccagggaggctggtagaagtcctgtttcctaattggtggggaggtgtccatgactgggacctgaactccagtataggggagggagacctgagcgccccagggagctggaactcttgggcttcagagcctcagagggaaacagggtctacatttctctgggagaaaaagcctgcacacaggtccccaaggagcagtgggctttgaatcttgatggggtggcggaggcccctggggtctgagacttccggggttctaagatggctgtggaccttggttcctaaatattgggtaaggggaggtctgcatctggaggagggatcgggggcttgtgcgagaaagctggagacttcttgatctctcctggggagtggatgggtttctataattgccctccaaaagcatgtagggagggtggtcccacaaaaatgaggtgaggtgaggtaagaggtctgggcatggtgggctctgggagtagccagggaccaggaatgaggtcttagggtgtggaggggca

SEQ ID NO: 445 - DNA, 1344 bp, Homo sapien
actactactactaaattcgcggccgtgtcaaaaacagaaaaggaggatctgagaatccaagcgatagaatcccttttgtcgtagacagaaagagcaaagtccagagagggcaggcttgaggcccaacagcacacagtaaggccctgtgggtctggcccttgcctattctcattcactgccccttcccactcctgtccagcctgatagactttccttctttttttttttgaaatggagtctcaccttgtcacccagtctggagtacagggatgtgatgactgtagctgagatgacaggcatgtgccaccacacctggctaatttttgtagtttagtagagaagggatttcaccctgttggtcaggctggtctcgaactcctgacctcaggtgatccacccgactcagactcccaaagtgctgggattacaggtgtgagccatcatggccgcctgactctttctgatgcctgagtggctaccttgagtcctgcctggggacccatgcacctgctgttctctttccttcaaggctctactcacaacttcctgttctactctcaaaccttcctgtgacgggctcagtcagatctcagctcacgtatcccctcagagaggacttcccctccctgaccaccctatctgaagtagctcacattcccccactattcatttcggccagttgagtttccttgtagcaattattactgtcaaaaatgatcttatttatttacctgtttattggcttttgacccgttgcctgtcctgttctctgttgtttccccagcatctagaacaataggtgcctgacacaataggtgcttcgtaaatatttattattattattattattttagagacagggtcttgctctgttgccccggctggaatacagtgggatgatcatggctcactgccatctccaactcctgggctcaaacgatcctcccacctccgcctacagagtagctgggactataggtacacagcaccaaattttctgtagagacgggggtcttgctttgtagcccacactagtgttgaactcctggcctcaagtgatcctcctgccttgatgggattacaggtgtgagccaccacacccagcctaaatgtttatttcattggtcagtgtcagaactaggattggaatttagattgttaatctcttgccacaagataggaaaatggagcaagatgaggagaaaaaagcatttaatgggagagaacacccttgtctgaggtcagggacctgggaagcaagcacgactttgccactgtcactgtgtgttacttggacagtgccttattttcccatctgtgaaataaaagagctggataagaacc

SEQ ID NO: 446 - DNA, 272 bp, Homo sapien
cctgatcactatggggaattgggcctgagtcgcatgctccggcgcatgggggcggggaattcgattagcctaaatgtttatttcattggtcagtgtcagaactaggattggaatttagattgttaatctcttgccacaagataggaaaatggagcaagatgaggagaaaaaagcatttaatgggagagaacatttggactcaatcactagtgaattcgcggccgcctgcaggtcgaccatattgggagagctcccaacgcgttgggaatgca

SEQ ID NO: 447 - DNA, 264 bp, Homo sapien
agatatataggggaatgggcgatgtgcatgtccggcgcatgggggcggtgaatcgattagcctaaatgtttatttcattggtcagtgtcagaactaggattggaatttagattgttaatctcttgccacaagataggaaaatggagcaagatgaggagaaaaaagcatttaatgggagagaacatttggactcaatcactagtgaattcgcggccgcctgcaggtcgaccatattgggagagctcccaacgcgttgggaatgca

SEQ ID NO: 448 - DNA, 3354 bp, Homo sapien
aggcgtgagccaccgccctggccaggaatcctgatacctttgggaaccatggtgaatgacatctagacccttctgtcctgaagggagttggtggcccagactctagcagggactatgtctttgtctcctagggagtagaaactggagttactggatgtttagtcctccagggaggctggtagaagtcctgtttcctaattggtggggaggtgtccatgactgggacctgaactccagtataggggagggagacctgagcgccccagggagctggaactcttgggcttcagagcctcagagggaaacagggtctacatttctctgggagaaaaagcctgcacacaggtccccaaggagcagtgggctttgaatcttgatggggtggcggaggcccctggggtctgagacttccggggttctaagatggctgtggaccttggttcctaaatattgggtaaggggaggtctgcatctggaggagggatcgggggcttgtgcgagaaagctggagacttcttgatctctcctggggagtggatgggtttctataattgccctccaaaagcatgtagggagggtggtcccacaaaaatgaggtgaggtgggtaagaggtctgggcatggtgggctctgggagtagccagggaccaggaatgaggtcttttgggtgtggaagggcagtaaagcatacctcagagacagctcctccaaaccttgtattgggatcccggcaactgcctctgtgagtgtgactgggaagggatatgactgccttcatcttctaggtgctgagcaattcaggtgatctctggggagtctgtttctctgtctcttttctttaggagtttctatctttttttggcctttttctcctggtatttaaccataaccctttatggccttggtgttttgtgcaccttccttttcagaagagcagctgtactgctgcactggtccaaacacttctgtatggacacctcgggtatccccaagaggctctgctttctgatgtacatagagggtgctgcattgagccaggggcccaccaaatgggtggtcaggcacttgagaccatgggaatatgccaggagtgaatgaagcaaaggcagaaaccacagtgcctggaatgttctaggctgctagccacatgtgggggaaaagttgcaggttacagaattcttcagtgtcaaaaacagaaaaggaggatctgagaatccaagcgatagaatcccttttgtcgtagacagaaagagcaaagtccagagagggcaggcttgaggcccaacagcacacagtaaggccctgtgggtctggcccttgcctattctcattcactgccccttcccactcctgtccagcctgatagactttccttctttttttttttgaaatggagtctcaccttgtcacccagtctggagtacagggatgtgatgactgtagctgagatgacaggcatgtgccaccacacctggctaatttttgtagtttagtagagaagggatttcaccctgttggtcaggctggtctcgaactcctgacctcaggtgatccacccgactcagactcccaaagtgctgggattacaggtgtgagccatcatggccgcctgactctttctgatgcctgagtggctaccttgagtcctgcctggggacccatgcacctgctgttctctttccttcaaggctctactcacaacttcctgttctactctcaaaccttcctgtgacgggctcagtcagatctcagctcacgtatcccctcagagaggacttcccctccctgaccaccctatctgaagtagctcacattcccccactattcatttcggccagttgagtttccttgtagcaattattactgtcaaaaatgatcttatttatttacctgtttattggcttttgacccgttgcctgtcctgttctctgttgtttccccagcatctagaacaataggtgcctgacacaataggtgcttcgtaaatatttattattattattattattttagagacagggtcttgctctgttgccccggctggaatacagtgggatgatcatggctcactgccatctccaactcctgggctcaaacgatcctcccacctccgcctacagagtagctgggactataggtacacagcaccaaattttctgtagagacgggggtcttgctttgtagcccacactagtgttgaactcctggcctcaagtgatcctcctgccttgatgggattacaggtgtgagccaccacacccagcctaaatgtttatttcattggtcagtgtcagaactaggattggaatttagattgttaatctcttgccacaagataggaaaatggagcaagatgaggagaaaaaagcatttaatgggagagaacacccttgtctgaggtcagggacctgggaagcaagcacgactttgccactgtcactgtgtgttacttggacagtgccttattttcccatctgtgaaataaaagagctggataagaaccttagttttgagatcctgtctcccttaaaagctgaagacaaaggtaactgatccaagggcagacaagggatggtaccatcatctccagcttggactcccactgctgacaaaatttgtcccttcaaagttgagatagctaccatggggaagagcacttagttctatactgaatggctccaggcattttcatgaaagctctttcagctttggggaagaatattcatccatatctttaccccatcatattagtgtctaagccctgcaatcaggcatgtcagccacgtgatggaatgggagggctgcagggcagcactgtccagtagaaacgaaatgcaagccacatatgtcattttaagttttctcttttttgagatggagtttcactccagtctgggcaacagaagttgagattccgtctcaaaaaaaaaaagttgcctgggcatagcaaatgtatgctgttaatacctcttcgtgtggtcatcaccctggcatgtgaaattttttggagaccctcccaaaagtcagggtgggaattaatgcccaaagacgcccacacttttaatcaggtatctaacgacacaattcgacctcccttaatagcgaaagaggtaattgtaaaaaagcggcccgagggaaatatataatccttgcaaacacaggacacaagtttgttcgcggtcacattacccaattgttgtcttctagtttgagacacatcaccgccattacactggtggtgggcacctagcccaacatggctgcgcagaacatttcggagacatccctgatttggaacacctccgttgtgtacatgccagcacaccaagcccgttatggtacctggagcaacac

SEQ ID NO: 449 - DNA, 3152 bp, Homo sapien
  misc_feature (2968)..(2968): n=a, c, g or t
aggcgtgagccaccgccctggccaggaatcctgatacctttgggaaccatggtgaatgacatctagacccttctgtcctgaagggagttggtggcccagactctagcagggactatgtctttgtctcctagggagtagaaactggagttactggatgtttagtcctccagggaggctggtagaagtcctgtttcctaattggtggggaggtgtccatgactgggacctgaactccagtataggggagggagacctgagcgccccagggagctggaactcttgggcttcagagcctcagagggaaacagggtctacatttctctgggagaaaaagcctgcacacaggtccccaaggagcagtgggctttgaatcttgatggggtggcggaggcccctggggtctgagacttccggggttctaagatggctgtggaccttggttcctaaatattgggtaaggggaggtctgcatctggaggagggatcgggggcttgtgcgagaaagctggagacttcttgatctctcctggggagtggatgggtttctataattgccctccaaaagcatgtagggagggtggtcccacaaaaatgaggtgaggtgggtaagaggtctgggcatggtgggctctgggagtagccagggaccaggaatgaggtcttttgggtgtggaagggcagtaaagcatacctcagagacagctcctccaaaccttgtattgggatcccggcaactgcctctgtgagtgtgactgggaagggatatgactgccttcatcttctaggtgctgagcaattcaggtgatctctggggagtctgtttctctgtctcttttctttaggagtttctatctttttttggcctttttctcctggtatttaaccataaccctttatggccttggtgttttgtgcaccttccttttcagaagagcagctgtactgctgcactggtccaaacacttctgtatggacacctcgggtatccccaagaggctctgctttctgatgtacatagagggtgctgcattgagccaggggcccaccaaatgggtggtcaggcacttgagaccatgggaatatgccaggagtgaatgaagcaaaggcagaaaccacagtgcctggaatgttctaggctgctagccacatgtgggggaaaagttgcaggttacagaattcttcagtgtcaaaaacagaaaaggaggatctgagaatccaagcgatagaatcccttttgtcgtagacagaaagagcaaagtccagagagggcaggcttgaggcccaacagcacacagtaaggccctgtgggtctggcccttgcctattctcattcactgccccttcccactcctgtccagcctgatagactttccttctttttttttttgaaatggagtctcaccttgtcacccagtctggagtacagggatgtgatgactgtagctgagatgacaggcatgtgccaccacacctggctaatttttgtagtttagtagagaagggatttcaccctgttggtcaggctggtctcgaactcctgacctcaggtgatccacccgactcagactcccaaagtgctgggattacaggtgtgagccatcatggccgcctgactctttctgatgcctgagtggctaccttgagtcctgcctggggacccatgcacctgctgttctctttccttcaaggctctactcacaacttcctgttctactctcaaaccttcctgtgacgggctcagtcagatctcagctcacgtatcccctcagagaggacttcccctccctgaccaccctatctgaagtagctcacattcccccactattcatttcggccagttgagtttccttgtagcaattattactgtcaaaaatgatcttatttatttacctgtttattggcttttgacccgttgcctgtcctgttctctgttgtttccccagcatctagaacaataggtgcctgacacaataggtgcttcgtaaatatttattattattattattattttagagacagggtcttgctctgttgccccggctggaatacagtgggatgatcatggctcactgccatctccaactcctgggctcaaacgatcctcccacctccgcctacagagtagctgggactataggtacacagcaccaaattttctgtagagacgggggtcttgctttgtagcccacactagtgttgaactcctggcctcaagtgatcctcctgccttgatgggattacaggtgtgagccaccacacccagcctaaatgtttatttcattggtcagtgtcagaactaggattggaatttagattgttaatctcttgccacaagataggaaaatggagcaagatgaggagaaaaaagcatttaatgggagagaacacccttgtctgaggtcagggacctgggaagcaagcacgactttgccactgtcactgtgtgttacttggacagtgccttattttcccatctgtgaaataaaagagctggataagaaccttagttttgagatcctgtctcccttaaaagctgaagacaaaggtaactgatccaagggcagacaagggatggtaccatcatctccagcttggactcccactgctgacaaaatttgtcccttcaaagttgagatagctaccatggggaagagcacttagttctatactgaatggctccaggcattttcatgaaagctctttcagctttggggaagaatattcatccatatctttaccccatcatattagtgtctaagccctgcaatcaggcatgtcagccacgtgatggaatgggagggctgcagggcagcactgtccagtagaaacgaaatgcaagccacatatgtcattttaagttttctcttttttgagatggagtttcactccatgggcaacagagtgagaytyygtctcaagaaaaaaacacagggacatgggaaacaaaatatagctttattacctattncctgggtttagagcgggcatggaaatttgtggaacagtccaaattacagtggaataatacaatacaaaatttataagtatagataattagatttctaatagtaataagtaaactttcaaaaaggccgggggtctatcaatttactaaagagggtacaaattaagggagttcacttaacacatat

SEQ ID NO: 450 - DNA, 2503 bp, Homo sapien
aggcgtgagccaccgccctggccaggaatcctgatacctttgggaaccatggtgaatgacatctagacccttctgtcctgaagggagttggtggcccagactctagcagggactatgtctttgtctcctagggagtagaaactggagttactggatgtttagtcctccagggaggctggtagaagtcctgtttcctaattggtggggaggtgtccatgactgggacctgaactccagtataggggagggagacctgagcgccccagggagctggaactcttgggcttcagagcctcagagggaaacagggtctacatttctctgggagaaaaagcctgcacacaggtccccaaggagcagtgggctttgaatcttgatggggtggcggaggcccctggggtctgagacttccggggttctaagatggctgtggaccttggttcctaaatattgggtaaggggaggtctgcatctggaggagggatcgggggcttgtgcgagaaagctggagacttcttgatctctcctggggagtggatgggtttctataattgccctccaaaagcatgtagggagggtggtcccacaaaaatgaggtgaggtgggtaagaggtctgggcatggtgggctctgggagtagccagggaccaggaatgaggtcttttgggtgtggaagggcagtaaagcatacctcagagacagctcctccaaaccttgtattgggatcccggcaactgcctctgtgagtgtgactgggaagggatatgactgccttcatcttctaggtgctgagcaattcaggtgatctctggggagtctgtttctctgtctcttttctttaggagtttctatctttttttggcctttttctcctggtatttaaccataaccctttatggccttggtgttttgtgcaccttccttttcagaagagcagctgtactgctgcactggtccaaacacttctgtatggacacctcgggtatccccaagaggctctgctttctgatgtacatagagggtgctgcattgagccaggggcccaccaaatgggtggtcaggcacttgagaccatgggaatatgccaggagtgaatgaagcaaaggcagaaaccacagtgcctggaatgttctaggctgctagccacatgtgggggaaaagttgcaggttacagaattcttcagtgtcaaaaacagaaaaggaggatctgagaatccaagcgatagaatcccttttgtcgtagacagaaagagcaaagtccagagagggcaggcttgaggcccaacagcacacagtaaggccctgtgggtctggcccttgcctattctcattcactgccccttcccactcctgtccagcctgatagactttccttctttttttttttgaaatggagtctcaccttgtcacccagtctggagtacagggatgtgatgactgtagctgagatgacaggcatgtgccaccacacctggctaatttttgtagtttagtagagaagggatttcaccctgttggtcaggctggtctcgaactcctgacctcaggtgatccacccgactcagactcccaaagtgctgggattacaggtgtgagccatcatggccgcctgactctttctgatgcctgagtggctaccttgagtcctgcctggggacccatgcacctgctgttctctttccttcaaggctctactcacaacttcctgttctactctcaaaccttcctgtgacgggctcagtcagatctcagctcacgtatcccctcagagaggacttcccctccctgaccaccctatctgaagtagctcacattcccccactattcatttcggccagttgagtttccttgtagcaattattactgtcaaaaatgatcttatttatttacctgtttattggcttttgacccgttgcctgtcctgttctctgttgtttccccagcatctagaacaataggtgcctgacacaataggtgcttcgtaaatatttattattattattattattttagagacagggtcttgctctgttgccccggctggaatacagtgggatgatcatggctcactgccatctccaactcctgggctcaaacgatcctcccacctccgcctacagagtagctgggactataggtacacagcaccaaattttctgtagagacgggggtcttgctttgtagcccacactagtgttgaactcctggcctcaagtgatcctcctgccttgatgggattacaggtgtgagccaccacacccagcctaaatgtttatttcattggtcagtgtcagaactaggattggaatttagattgttaatctcttgccacaagataggaaaatggagcaagatgaggagaaaaaagcatttaatgggagagaacacccttgtctgaggtcagggacctgggaagcaagcacgactttgccactgtcactgtgtgttacttggacagtgccttattttcccatctgtgaaataaaagagctggataagaacc

SEQ ID NO: 451 - DNA, 3044 bp, Homo sapien
  misc_feature (2860)..(2860): n=a, c, g or t
aggcgtgagccaccgccctggccaggaatcctgatacctttgggaaccatggtgaatgacatctagacccttctgtcctgaagggagttggtggcccagactctagcagggactatgtctttgtctcctagggagtagaaactggagttactggatgtttagtcctccagggaggctggtagaagtcctgtttcctaattggtggggaggtgtccatgactgggacctgaactccagtataggggagggagacctgagcgccccagggagctggaactcttgggcttcagagcctcagagggaaacagggtctacatttctctgggagaaaaagcctgcacacaggtccccaaggagcagtgggctttgaatcttgatggggtggcggaggcccctggggtctgagacttccggggttctaagatggctgtggaccttggttcctaaatattgggtaaggggaggtctgcatctggaggagggatcgggggcttgtgcgagaaagctggagacttcttgatctctcctggggagtggatgggtttctataattgccctccaaaagcatgtagggagggtggtcccacaaaaatgaggtgaggtgggtaagaggtctgggcatggtgggctctgggagtagccagggaccaggaatgaggtcttttgggtgtggaagggcagtaaagcatacctcagagacagctcctccaaaccttgtattgggatcccggcaactgcctctgtgagtgtgactgggaagggatatgactgccttcatcttctaggtgctgagcaattcaggtgatctctggggagtctgtttctctgtctcttttctttaggagtttctatctttttttggcctttttctcctggtatttaaccataaccctttatggccttggtgttttgtgcaccttccttttcagaagagcagctgtactgctgcactggtccaaacacttctgtatggacacctcgggtatccccaagaggctctgctttctgatgtacatagagggtgctgcattgagccaggggcccaccaaatgggtggtcaggcacttgagaccatgggaatatgccaggagtgaatgaagcaaaggcagaaaccacagtgcctggaatgttctaggctgctagccacatgtgggggaaaagttgcaggttacagaattcttcagtgtcaaaaacagaaaaggaggatctgagaatccaagcgatagaatcccttttgtcgtagacagaaagagcaaagtccagagagggcaggcttgaggcccaacagcacacagtaaggccctgtgggtctggcccttgcctattctcattcactgccccttcccactcctgtccagcctgatagactttccttctttttttttttgaaatggagtctcaccttgtcacccagtctggagtacagggatgtgatgactgtagctgagatgacaggcatgtgccaccacacctggctaatttttgtagtttagtagagaagggatttcaccctgttggtcaggctggtctcgaactcctgacctcaggtgatccacccgactcagactcccaaagtgctgggattacaggtgtgagccatcatggccgcctgactctttctgatgcctgagtggctaccttgagtcctgcctggggacccatgcacctgctgttctctttccttcaaggctctactcacaacttcctgttctactctcaaaccttcctgtgacgggctcagtcagatctcagctcacgtatcccctcagagaggacttcccctccctgaccaccctatctgaagtagctcacattcccccactattcatttcggccagttgagtttccttgtagcaattattactgtcaaaaatgatcttatttatttacctgtttattggcttttgacccgttgcctgtcctgttctctgttgtttccccagcatctagaacaataggtgcctgacacaataggtgcttcgtaaatatttattattattattattattttagagacagggtcttgctctgttgccccggctggaatacagtgggatgatcatggctcactgccatctccaactcctgggctcaaacgatcctcccacctccgcctacagagtagctgggactataggtacacagcaccaaattttctgtagagacgggggtcttgctttgtagcccacactagtgttgaactcctggcctcaagtgatcctcctgccttgatgggattacaggtgtgagccaccacacccagcctaaatgtttatttcattggtcagtgtcagaactaggattggaatttagattgttaatctcttgccacaagataggaaaatggagcaagatgaggagaaaaaagcatttaatgggagagaacacccttgtctgaggtcagggacctgggaagcaagcacgactttgccactgtcactgtgtgttacttggacagtgccttattttcccatctgtgaaataaaagagctggataagaaccttagttttgagatcctgtctcccttaaaagctgaagacaaaggtaactgatccaagggcagacaagggatggtaccatcatctccagcttggactcccactgctgacaaaatttgtcccttcaaagttgagatagctaccatggggaagagcacttagttctatactgaatggctccaggcattttcatgaaagctctttcagctttggggaagaatattcatccatatctttaccccatcatattagtgtctaagccctgcaatcaggcatgtcagcctgggcaacagagtgagaytyygtctcaagaaaaaaacacagggacatgggaaacaaaatatagctttattacctattncctgggtttagagcgggcatggaaatttgtggaacagtccaaattacagtggaataatacaatacaaaatttataagtatagataattagatttctaatagtaataagtaaactttcaaaaaggccgggggtctatcaatttactaaagagggtacaaattaagggagttcacttaacacatat

SEQ ID NO: 452 - DNA, 2467 bp, Homo sapien
aggcgtgagccaccgccctggccaggaatcctgatacctttgggaaccatggtgaatgacatctagacccttctgtcctgaagggagttggtggcccagactctagcagggactatgtctttgtctcctagggagtagaaactggagttactggatgtttagtcctccagggaggctggtagaagtcctgtttcctaattggtggggaggtgtccatgactgggacctgaactccagtataggggagggagacctgagcgccccagggagctggaactcttgggcttcagagcctcagagggaaacagggtctacatttctctgggagaaaaagcctgcacacaggtccccaaggagcagtgggctttgaatcttgatggggtggcggaggcccctggggtctgagacttccggggttctaagatggctgtggaccttggttcctaaatattgggtaaggggaggtctgcatctggaggagggatcgggggcttgtgcgagaaagctggagacttcttgatctctcctggggagtggatgggtttctataattgccctccaaaagcatgtagggagggtggtcccacaaaaatgaggtgaggtgggtaagaggtctgggcatggtgggctctgggagtagccagggaccaggaatgaggtcttttgggtgtggaagggcagtaaagcatacctcagagacagctcctccaaaccttgtattgggatcccggcaactgcctctgtgagtgtgactgggaagggatatgactgccttcatcttctaggtgctgagcaattcaggtgatctctggggagtctgtttctctgtctcttttctttaggagtttctatctttttttggcctttttctcctggtatttaaccataaccctttatggccttggtgttttgtgcaccttccttttcagaagagcagctgtactgctgcactggtccaaacacttctgtatggacacctcgggtatccccaagaggctctgctttctgatgtacatagagggtgctgcattgagccaggggcccaccaaatgggtggtcaggcacttgagaccatgggaatatgccaggagtgaatgaagcaaaggcagaaaccacagtgcctggaatgttctaggctgctagccacatgtgggggaaaagttgcaggttacagaattcttcagtgtcaaaaacagaaaaggaggatctgagaatccaagcgatagaatcccttttgtcgtagacagaaagagcaaagtccagagagggcaggcttgaggcccaacagcacacagtaaggccctgtgggtctggcccttgcctattctcattcactgccccttcccactcctgtccagcctgatagactttccttctttttttttttgaaatggagtctcaccttgtcacccagtctggagtacagggatgtgatgactgtagctgagatgacaggcatgtgccaccacacctggctaatttttgtagtttagtagagaagggatttcaccctgttggtcaggctggtctcgaactcctgacctcaggtgatccacccgactcagactcccaaagtgctgggattacaggtgtgagccatcatggccgcctgactctttctgatgcctgagtggctaccttgagtcctgcctggggacccatgcacctgctgttctctttccttcaaggctctactcacaacttcctgttctactctcaaaccttcctgtgacgggctcagtcagatctcagctcacgtatcccctcagagaggacttcccctccctgaccaccctatctgaagtagctcacattcccccactattcatttcggccagttgagtttccttgtagcaattattactgtcaaaaatgatcttatttatttacctgtttattggcttttgacccgttgcctgtcctgttctctgttgtttccccagcatctagaacaataggtgcctgacacaataggtgcttcgtaaatatttattattattattattattttagagacagggtcttgctctgttgccccggctggaatacagtgggatgatcatggctcactgccatctccaactcctgggctcaaacgatcctcccacctccgcctacagagtagctgggactataggtacacagcaccaaattttctgtagagacgggggtcttgctttgtagcccacactagtgttgaactcctggcctcaagtgatcctcctgccttgatgggattacaggtgtgagccaccacacccagcctaaatgtttatttcattggtcagtgtcagaactaggattggaatttagattgttaatctcttgccacaagataggaaaatggagcaagatgaggagaaaaaagcatttaatgggagagaacatttggactcaatcactagtgaattcgcggccgcctgcaggtcgaccatattgggagagctcccaacgcgttgggaatgca

SEQ ID NO: 453 - DNA, 3323 bp, Homo sapien
aggcgtgagccaccgccctggccaggaatcctgatacctttgggaaccatggtgaatgacatctagacccttctgtcctgaagggagttggtggcccagactctagcagggactatgtctttgtctcctagggagtagaaactggagttactggatgtttagtcctccagggaggctggtagaagtcctgtttcctaattggtggggaggtgtccatgactgggacctgaactccagtataggggagggagacctgagcgccccagggagctggaactcttgggcttcagagcctcagagggaaacagggtctacatttctctgggagaaaaagcctgcacacaggtccccaaggagcagtgggcggggtctgagacttccggggttctaagatggctgtggaccttggttcctaaatattgggtaaggggaggtctgcatctggaggagggatcgggggcttgtgcgagaaagctggagacttcttgatctctcctggggagtggatgggtttctataattgccctccaaaagcatgtagggagggtggtcccacaaaaatgaggtgaggtgggtaagaggtctgggcatggtgggctctgggagtagccagggaccaggaatgaggtcttttgggtgtggaagggcagtaaagcatacctcagagacagctcctccaaaccttgtattgggatcccggcaactgcctctgtgagtgtgactgggaagggatatgactgccttcatcttctaggtgctgagcaattcaggtgatctctggggagtctgtttctctgtctcttttctttaggagtttctatctttttttggcctttttctcctggtatttaaccataaccctttatggccttggtgttttgtgcaccttccttttcagaagagcagctgtactgctgcactggtccaaacacttctgtatggacacctcgggtatccccaagaggctctgctttctgatgtacatagagggtgctgcattgagccaggggcccaccaaatgggtggtcaggcacttgagaccatgggaatatgccaggagtgaatgaagcaaaggcagaaaccacagtgcctggaatgttctaggctgctagccacatgtgggggaaaagttgcaggttacagaattcttcagtgtcaaaaacagaaaaggaggatctgagaatccaagcgatagaatcccttttgtcgtagacagaaagagcaaagtccagagagggcaggcttgaggcccaacagcacacagtaaggccctgtgggtctggcccttgcctattctcattcactgccccttcccactcctgtccagcctgatagactttccttctttttttttttgaaatggagtctcaccttgtcacccagtctggagtacagggatgtgatgactgtagctgagatgacaggcatgtgccaccacacctggctaatttttgtagtttagtagagaagggatttcaccctgttggtcaggctggtctcgaactcctgacctcaggtgatccacccgactcagactcccaaagtgctgggattacaggtgtgagccatcatggccgcctgactctttctgatgcctgagtggctaccttgagtcctgcctggggacccatgcacctgctgttctctttccttcaaggctctactcacaacttcctgttctactctcaaaccttcctgtgacgggctcagtcagatctcagctcacgtatcccctcagagaggacttcccctccctgaccaccctatctgaagtagctcacattcccccactattcatttcggccagttgagtttccttgtagcaattattactgtcaaaaatgatcttatttatttacctgtttattggcttttgacccgttgcctgtcctgttctctgttgtttccccagcatctagaacaataggtgcctgacacaataggtgcttcgtaaatatttattattattattattattttagagacagggtcttgctctgttgccccggctggaatacagtgggatgatcatggctcactgccatctccaactcctgggctcaaacgatcctcccacctccgcctacagagtagctgggactataggtacacagcaccaaattttctgtagagacgggggtcttgctttgtagcccacactagtgttgaactcctggcctcaagtgatcctcctgccttgatgggattacaggtgtgagccaccacacccagcctaaatgtttatttcattggtcagtgtcagaactaggattggaatttagattgttaatctcttgccacaagataggaaaatggagcaagatgaggagaaaaaagcatttaatgggagagaacacccttgtctgaggtcagggacctgggaagcaagcacgactttgccactgtcactgtgtgttacttggacagtgccttattttcccatctgtgaaataaaagagctggataagaaccttagttttgagatcctgtctcccttaaaagctgaagacaaaggtaactgatccaagggcagacaagggatggtaccatcatctccagcttggactcccactgctgacaaaatttgtcccttcaaagttgagatagctaccatggggaagagcacttagttctatactgaatggctccaggcattttcatgaaagctctttcagctttggggaagaatattcatccatatctttaccccatcatattagtgtctaagccctgcaatcaggcatgtcagccacgtgatggaatgggagggctgcagggcagcactgtccagtagaaacgaaatgcaagccacatatgtcattttaagttttctcttttttgagatggagtttcactccagtctgggcaacagaagttgagattccgtctcaaaaaaaaaaagttgcctgggcatagcaaatgtatgctgttaatacctcttcgtgtggtcatcaccctggcatgtgaaattttttggagaccctcccaaaagtcagggtgggaattaatgcccaaagacgcccacacttttaatcaggtatctaacgacacaattcgacctcccttaatagcgaaagaggtaattgtaaaaaagcggcccgagggaaatatataatccttgcaaacacaggacacaagtttgttcgcggtcacattacccaattgttgtcttctagtttgagacacatcaccgccattacactggtggtgggcacctagcccaacatggctgcgcagaacatttcggagacatccctgatttggaacacctccgttgtgtacatgccagcacaccaagcccgttatggtacctggagcaacac

SEQ ID NO: 454 - DNA, 1815 bp, Homo sapien
  misc_feature (1809)..(1809): n=a, c, g or t
aggcgtgagccaccgccctggccaggaatcctgatacctttgggaaccatggtgaatgacatctagacccttctgtcctgaagggagttggtggcccagactctagcagggactatgtctttgtctcctagggagtagaaactggagttactggatgtttagtcctccagggaggctggtagaagtcctgtttcctaattggtggggaggtgtccatgactgggacctgaactccagtataggggagggagacctgagcgccccagggagctggaactcttgggcttcagagcctcagagggaaacagggtctacatttctctgggagaaaaagcctgcacacaggtccccaaggagcagtgggctttgaatcttgatggggtggcggaggcccctggggtctgagacttccggggttctaagatggctgtggaccttggttcctaaatattgggtaaggggaggtctgcatctggaggagggatcgggggcttgtgcgagaaagctggagacttcttgatctctcctggggagtggatgggtttctataattgccctccaaaagcatgtagggagggtggtcccacaaaaatgaggtgaggtgggtaagaggtctgggcatggtgggctctgggagtagccagggaccaggaatgaggtcttttgggtgtggaagggcagtaaagcatacctcagagacagctcctccaaaccttgtattgggatcccggcaactgcctctgtgagtgtgactgggaagggatatgactgccttcatcttctaggtgctgagcaattcaggtgatctctggggagtctgtttctctgtctcttttctttaggagtttctatctttttttggcctttttctcctggtatttaaccataaccctttatggccttggtgttttgtgcaccttccttttcagaagagcagctgtactgctgcactggtccaaacacttctgtatggacacctcgggtatccccaagaggctctgctttctgatgtacatagagggtgctgcattgagccaggggcccaccaaatgggtggtcaggcacttgagaccatgggaatatgccaggagtgaatgaagcaaaggcagaaaccacagtgcctggaatgttctaggctgctagccacatgtgggggaaaagttgcaggttacagaattcttcagtgtcaaaaacagaaaaggaggatctgagaatccaagcgatagaatcccttttgtcgtagacagaaagagcaaagtccagagagggcaggcttgaggcccaacagcacacagtaaggccctgtgggtctggcccttgcctattctcattcactgccccttcccactcctgtccagcctgatagactttccttctttttttttttgaaatggagtctcaccttgtcacccagtctggagtacagggatgtgatgactgtagctgagatgacaggcatgtgccaccacacctggctaatttttgtagtttagtagagaagggatttcaccctgttggtcaggctggtctcgaactcctgacctcaggtgatccacccgactcagactcccaaagtgctgggattacaggtgtgagccaccgcccctggccaggaatcctgatacctttgggaaccatggtgaatgacatctagacccctctgtcctgaagggagttggtggcccagactctagcagggactatgtctttgtctcctagggagtagaaactggagttactggatgtttagtcctccagggaggctggtagaagtcctgtttcctaattggtgggtgtagagcggagggntcctgt

SEQ ID NO: 455 - DNA, 2580 bp, Homo sapien
tgcaagagcttgttgcttgaagccctgcttttccaaaaagtgggccactctggtcctcttttctttaggagtttctatctttttttggcctttttctcctggtatttaaccataaccctttatggccttggtgttttgtgcaccttccttttcagaagagcagctgtactgctgcactggtccaaacacttctgtatggacacctcgggtatccccaagaggctctgctttctgatgtacatagagggtgctgcattgagccaggggcccaccaaatgggtggtcaggcacttgagaccatgggaatatgccaggagtgaatgaagcaaaggcagaaaccacagtgcctggaatgttctaggctgctagccacatgtgggggaaaagttgcaggttacagaattcttcagtgtcaaaaacagaaaaggaggatctgagaatccaagcgatagaatcccttttgtcgtagacagaaagagcaaagtccagagagggcaggcttgaggcccaacagcacacagtaaggccctgtgggtctggcccttgcctattctcattcactgccccttcccactcctgtccagcctgatagactttccttctttttttttttgaaatggagtctcaccttgtcacccagtctggagtacagggatgtgatgactgtagctgagatgacaggcatgtgccaccacacctggctaatttttgtagtttagtagagaagggatttcaccctgttggtcaggctggtctcgaactcctgacctcaggtgatccacccgactcagactcccaaagtgctgggattacaggtgtgagccatcatggccgcctgactctttctgatgcctgagtggctaccttgagtcctgcctggggacccatgcacctgctgttctctttccttcaaggctctactcacaacttcctgttctactctcaaaccttcctgtgacgggctcagtcagatctcagctcacgtatcccctcagagaggacttcccctccctgaccaccctatctgaagtagctcacattcccccactattcatttcggccagttgagtttccttgtagcaattattactgtcaaaaatgatcttatttatttacctgtttattggcttttgacccgttgcctgtcctgttctctgttgtttccccagcatctagaacaataggtgcctgacacaataggtgcttcgtaaatatttattattattattattattttagagacagggtcttgctctgttgccccggctggaatacagtgggatgatcatggctcactgccatctccaactcctgggctcaaacgatcctcccacctccgcctacagagtagctgggactataggtacacagcaccaaattttctgtagagacgggggtcttgctttgtagcccacactagtgttgaactcctggcctcaagtgatcctcctgccttgatgggattacaggtgtgagccaccacacccagcctaaatgtttatttcattggtcagtgtcagaactaggattggaatttagattgttaatctcttgccacaagataggaaaatggagcaagatgaggagaaaaaagcatttaatgggagagaacacccttgtctgaggtcagggacctgggaagcaagcacgactttgccactgtcactgtgtgttacttggacagtgccttattttcccatctgtgaaataaaagagctggataagaaccttagttttgagatcctgtctcccttaaaagctgaagacaaaggtaactgatccaagggcagacaagggatggtaccatcatctccagcttggactcccactgctgacaaaatttgtcccttcaaagttgagatagctaccatggggaagagcacttagttctatactgaatggctccaggcattttcatgaaagctctttcagctttggggaagaatattcatccatatctttaccccatcatattagtgtctaagccctgcaatcaggcatgtcagccacgtgatggaatgggagggctgcagggcagcactgtccagtagaaacgaaatgcaagccacatatgtcattttaagttttctcttttttgagatggagtttcactccagtctgggcaacagaagttgagattccgtctcaaaaaaaaaaagttgcctgggcatagcaaatgtatgctgttaatacctcttcgtgtggtcatcaccctggcatgtgaaattttttggagaccctcccaaaagtcagggtgggaattaatgcccaaagacgcccacacttttaatcaggtatctaacgacacaattcgacctcccttaatagcgaaagaggtaattgtaaaaaagcggcccgagggaaatatataatccttgcaaacacaggacacaagtttgttcgcggtcacattacccaattgttgtcttctagtttgagacacatcaccgccattacactggtggtgggcacctagcccaacatggctgcgcagaacatttcggagacatccctgatttggaacacctccgttgtgtacatgccagcacaccaagcccgttatggtacctggagcaacac

SEQ ID NO: 456 - DNA, 2195 bp, Homo sapien
actactactactaaattcgcggccgtgtcaaaaacagaaaaggaggatctgagaatccaagcgatagaatcccttttgtcgtagacagaaagagcaaagtccagagagggcaggcttgaggcccaacagcacacagtaaggccctgtgggtctggcccttgcctattctcattcactgccccttcccactcctgtccagcctgatagactttccttctttttttttttgaaatggagtctcaccttgtcacccagtctggagtacagggatgtgatgactgtagctgagatgacaggcatgtgccaccacacctggctaatttttgtagtttagtagagaagggatttcaccctgttggtcaggctggtctcgaactcctgacctcaggtgatccacccgactcagactcccaaagtgctgggattacaggtgtgagccatcatggccgcctgactctttctgatgcctgagtggctaccttgagtcctgcctggggacccatgcacctgctgttctctttccttcaaggctctactcacaacttcctgttctactctcaaaccttcctgtgacgggctcagtcagatctcagctcacgtatcccctcagagaggacttcccctccctgaccaccctatctgaagtagctcacattcccccactattcatttcggccagttgagtttccttgtagcaattattactgtcaaaaatgatcttatttatttacctgtttattggcttttgacccgttgcctgtcctgttctctgttgtttccccagcatctagaacaataggtgcctgacacaataggtgcttcgtaaatatttattattattattattattttagagacagggtcttgctctgttgccccggctggaatacagtgggatgatcatggctcactgccatctccaactcctgggctcaaacgatcctcccacctccgcctacagagtagctgggactataggtacacagcaccaaattttctgtagagacgggggtcttgctttgtagcccacactagtgttgaactcctggcctcaagtgatcctcctgccttgatgggattacaggtgtgagccaccacacccagcctaaatgtttatttcattggtcagtgtcagaactaggattggaatttagattgttaatctcttgccacaagataggaaaatggagcaagatgaggagaaaaaagcatttaatgggagagaacacccttgtctgaggtcagggacctgggaagcaagcacgactttgccactgtcactgtgtgttacttggacagtgccttattttcccatctgtgaaataaaagagctggataagaaccttagttttgagatcctgtctcccttaaaagctgaagacaaaggtaactgatccaagggcagacaagggatggtaccatcatctccagcttggactcccactgctgacaaaatttgtcccttcaaagttgagatagctaccatggggaagagcacttagttctatactgaatggctccaggcattttcatgaaagctctttcagctttggggaagaatattcatccatatctttaccccatcatattagtgtctaagccctgcaatcaggcatgtcagccacgtgatggaatgggagggctgcagggcagcactgtccagtagaaacgaaatgcaagccacatatgtcattttaagttttctcttttttgagatggagtttcactccagtctgggcaacagaagttgagattccgtctcaaaaaaaaaaagttgcctgggcatagcaaatgtatgctgttaatacctcttcgtgtggtcatcaccctggcatgtgaaattttttggagaccctcccaaaagtcagggtgggaattaatgcccaaagacgcccacacttttaatcaggtatctaacgacacaattcgacctcccttaatagcgaaagaggtaattgtaaaaaagcggcccgagggaaatatataatccttgcaaacacaggacacaagtttgttcgcggtcacattacccaattgttgtcttctagtttgagacacatcaccgccattacactggtggtgggcacctagcccaacatggctgcgcagaacatttcggagacatccctgatttggaacacctccgttgtgtacatgccagcacaccaagcccgttatggtacctggagcaacac

SEQ ID NO: 457 - DNA, 1151 bp, Homo sapien
agatatataggggaatgggcgatgtgcatgtccggcgcatgggggcggtgaatcgattagcctaaatgtttatttcattggtcagtgtcagaactaggattggaatttagattgttaatctcttgccacaagataggaaaatggagcaagatgaggagaaaaaagcatttaatgggagagaacacccttgtctgaggtcagggacctgggaagcaagcacgactttgccactgtcactgtgtgttacttggacagtgccttattttcccatctgtgaaataaaagagctggataagaaccttagttttgagatcctgtctcccttaaaagctgaagacaaaggtaactgatccaagggcagacaagggatggtaccatcatctccagcttggactcccactgctgacaaaatttgtcccttcaaagttgagatagctaccatggggaagagcacttagttctatactgaatggctccaggcattttcatgaaagctctttcagctttggggaagaatattcatccatatctttaccccatcatattagtgtctaagccctgcaatcaggcatgtcagccacgtgatggaatgggagggctgcagggcagcactgtccagtagaaacgaaatgcaagccacatatgtcattttaagttttctcttttttgagatggagtttcactccagtctgggcaacagaagttgagattccgtctcaaaaaaaaaaagttgcctgggcatagcaaatgtatgctgttaatacctcttcgtgtggtcatcaccctggcatgtgaaattttttggagaccctcccaaaagtcagggtgggaattaatgcccaaagacgcccacacttttaatcaggtatctaacgacacaattcgacctcccttaatagcgaaagaggtaattgtaaaaaagcggcccgagggaaatatataatccttgcaaacacaggacacaagtttgttcgcggtcacattacccaattgttgtcttctagtttgagacacatcaccgccattacactggtggtgggcacctagcccaacatggctgcgcagaacatttcggagacatccctgatttggaacacctccgttgtgtacatgccagcacaccaagcccgttatggtacctggagcaacac

SEQ ID NO: 458 - DNA, 978 bp, Homo sapien
aaggggaaaataaacttgttgattgctaaacaggtgagagatgggcatcaaagaatacttcaaaaagctgttacttggacagtgccttattttcccatctgtgaaataaaagagctggataagaaccttagttttgagatcctgtctcccttaaaagctgaagacaaaggtaactgatccaagggcagacaagggatggtaccatcatctccagcttggactcccactgctgacaaaatttgtcccttcaaagttgagatagctaccatggggaagagcacttagttctatactgaatggctccaggcattttcatgaaagctctttcagctttggggaagaatattcatccatatctttaccccatcatattagtgtctaagccctgcaatcaggcatgtcagccacgtgatggaatgggagggctgcagggcagcactgtccagtagaaacgaaatgcaagccacatatgtcattttaagttttctcttttttgagatggagtttcactccagtctgggcaacagaagttgagattccgtctcaaaaaaaaaaagttgcctgggcatagcaaatgtatgctgttaatacctcttcgtgtggtcatcaccctggcatgtgaaattttttggagaccctcccaaaagtcagggtgggaattaatgcccaaagacgcccacacttttaatcaggtatctaacgacacaattcgacctcccttaatagcgaaagaggtaattgtaaaaaagcggcccgagggaaatatataatccttgcaaacacaggacacaagtttgttcgcggtcacattacccaattgttgtcttctagtttgagacacatcaccgccattacactggtggtgggcacctagcccaacatggctgcgcagaacatttcggagacatccctgatttggaacacctccgttgtgtacatgccagcacaccaagcccgttatggtacctggagcaacac

SEQ ID NO: 459 - DNA, 753 bp, Homo sapien
aggtttattcttttttgaaagtacagtactctgttaaaattcctgtgtaaactgggacttttcttttcactttcctgtgtttcaagaacagtaggtgttccagggcttttgtcctgctgggtacaagcaagtaggattttgagaaggtgtgaggaggaggtcagaaaaattggtggaaataggaaagagaaagaaatatggccccgattttggggagagaaagtctggggaaagagcaaaggcaattaaagaggattttgaggaagagacttctgtaaaatatgtcttagcaacactttttggagttgaaaatatttctttttagtgtgttattttttctaagaggtgcctcaagatggataatggaagatttggagtacgattgggttgacaatccaaggagattcggtgacatccagattaccctgaaataaaaaacaaaaaaaaacttctggaaaatgcacaagaagtttagattcttagaaaatcttctgatagtttctatttgtgaatttatagactttaatttattacacaaagtttttaaacattggtgcatatcagttttcctcattttatagtaaggaacactgaggcataggccatatgcatagccaaagatcacatagtggtcagtgtctctctgacttaattcagcaggcttcattgcacaggttcttcattgcattaactagctgtgatcaataatgtacctctttggtggtatgtcaaacgtgaattcagattcctttg

SEQ ID NO: 460 - DNA, 1009 bp, Homo sapien
  misc_feature (63)..(63): n=a, c, g or t
  misc_feature (93)..(93): n=a, c, g or t
  misc_feature (211)..(211): n=a, c, g or t
tggagcgcagtgccgcgattcttgtctcactacaacctctgcctcccaggttcaagtgatttncctgcctcagcctccctagtagctgggatnacaggtgcccgccaccacacctggctaatttttttgtatttttagtagacacggggttttgccacgttgaacaggctggtctcaaactcctgacctcaggtgatctgcctgcctccgnctcccaaagtactgggattacaggtgtgagccaccgcacccagccaggtttattcttttttgaaagtacagtactctgttaaaattcctgtgtaaactgggacttttcttttcactttcctgtgtttcaagaacagtaggtgttccagggcttttgtcctgctgggtacaagcaagtaggattttgagaaggtgtgaggaggaggtcagaaaaattggtggaaataggaaagagaaagaaatatggccccgattttggggagagaaagtctggggaaagagcaaaggcaattaaagaggattttgaggaagagacttctgtaaaatatgtcttagcaacactttttggagttgaaaatatttctttttagtgtgttattttttctaagaggtgcctcaagatggataatggaagatttggagtacgattgggttgacaatccaaggagattcggtgacatccagattaccctgaaataaaaaacaaaaaaaaacttctggaaaatgcacaagaagtttagattcttagaaaatcttctgatagtttctatttgtgaatttatagactttaatttattacacaaagtttttaaacattggtgcatatcagttttcctcattttatagtaaggaacactgaggcataggccatatgcatagccaaagatcacatagtggtcagtgtctctctgacttaattcagcaggcttcattgcacaggttcttcattgcattaactagctgtgatcaataatgtacctctttggtggtatgtcaaacgtgaattcagattcctttg

SEQ ID NO: 461 - DNA, 812 bp, Homo sapien
cttccaaacttgggtgatctgcctgccttggcctctcaaaatacaggtgtgagccaccgcacccagccaggtttattcttttttgaaagtacagtactctgttaaaattcctgtgtaaactgggacttttcttttcactttcctgtgtttcaagaacagtaggtgttccagggcttttgtcctgctgggtacaagcaagtaggattttgagaaggtgtgaggaggaggtcagaaaaattggtggaaataggaaagagaaagaaatatggccccgattttggggagagaaagtctggggaaagagcaaaggcaattaaagaggattttgaggaagagacttctgtaaaatatgtcttagcaacactttttggagttgaaaatatttctttttagtgtgttattttttctaagaggtgcctcaagatggataatggaagatttggagtacgattgggttgacaatccaaggagattcggtgacatccagattaccctgaaataaaaaaaaaaaaaaattctggaaaatgagagaagtttagattcttagaaaatcttctgatagtttctatttgtgaatttatagactttaatttattacacaaagtttttaaaccattggtgcatatcagttttcctcattttatagtaaggaaactgaggcataggccatatgatagccaaagatcacatagtggtagtgtcttctgacttaattcagcaggcttcattgcacaggttcttcattgcatttactagttgtgtttataatgttcctctttgtggtatgtcaaaagtgaattcagattcctttg

SEQ ID NO: 462 - DNA, 736 bp, Homo sapien
  misc_feature (400)..(440): n=a, c, g or t
gctcattacaagaggccaggaaacagactctggtggctgagacccaggtggaggtggcggggagcagtgggtggttttctggactcattaaaaggcagagccaaagaactttggagggactggacatgaggctgagagaaggagaaagggggagttgggggcaagtccaagggctctggctgagcacctagaagggggcactgctaggcagggaaggtggagggaggggggagtctggagggggaagctgcatgtcaggagtctggagcagggtgagtttgatttgagacacccaggcacccatggagagagctgaatgagatggtaagaaacccaagctgcagggagatgagggagttgctggcatatggaggcacttaaagtcaagacactgaatgannnnnnnnnnnnnnnnnnnnnnnnnnnnnnnnnnnnnnnnnccgtcacatttctaaacaagcatgaaaggggttcatttttgtcttcttcttgcctgccgtcagcatggtggaaatggctctgcctatgctcatgcttctggtgcccaatgccttgcactgtgccattcaacactatgaagagaaacaagtagccacacctcaataatgtggctgtcaactggcctaaataaacctacacaaaccagtacttgccttttgctggaaacattgattatgtgctcctcacgtagtagaaagcggtatcctgattagtctaacagttgtgttagacttta

SEQ ID NO: 463 - DNA, 623 bp, Homo sapien
  misc_feature (288)..(502): n=a, c, g or t
ccgcctcatgtcgcaggactgctgtgtttgtgaaagcgcgtttgtttccacaagacaagctccgtgtagtcaccagcgggtgcctggcccaggagctgccctgtggagccagcgttgtccccgagctgctcgcctgtggccatggctccttttctgaggctcctgactccattcttgcagattctggtggatcaggagcttacattctaaatgctacatagaggtgttgaagaaaatttcataggttctgtaatagtggatgggattaaaagaaaaaatgttaaattnnnnnnnnnnnnnnnnnnnnnnnnnnnnnnnnnnnnnnnnnnnnnnnnnnnnnnnnnnnnnnnnnnnnnnnnnnnnnnnnnnnnnnnnnnnnnnnnnnnnnnnnnnnnnnnnnnnnnnnnnnnnnnnnnnnnnnnnnnnnnnnnnnnnnnnnnnnnnnnnnnnnnnnnnnnnnnnnnnnnnnnnnnnnnnnnnnnnnnnnnnnnnnnnnnnnnnnacatatataattggatgggttgtgagaagccaaccccccccaaaaaaggggggggtgtagagcagttcccctgagaggtgccgtgggtgccccgtagtggtctatgtctgtgcacaggcga

SEQ ID NO: 464 - DNA, 771 bp, Homo sapien
  misc_feature (90)..(266): n=a, c, g or t
gtgaaggaaaacaagtgtctatatttttgtgagacttcaagtctataagaattatttagaatagagaagttcataataataaaaggttannnnnnnnnnnnnnnnnnnnnnnnnnnnnnnnnnnnnnnnnnnnnnnnnnnnnnnnnnnnnnnnnnnnnnnnnnnnnnnnnnnnnnnnnnnnnnnnnnnnnnnnnnnnnnnnnnnnnnnnnnnnnnnnnnnnnnnnnnnnnnnnnnnnnnnnnnnnnnnnnnnnnnnnnnnnnnnnnatagcctcaaaatatttaaagatcaatagaaccataagaagaaataagtaaatccactgaaacacagctcctaactattgataagtcaagtaaacagaaaatgagtaacaatacagaagatgtgaaacctagggctaacaagcttgctttatggtacatgcatagaatagtgtaagtaacaaagaaaacacattactcttaagcatgcaaggtgttctgtcaaaagtttaccacatattaagccacaaagcaggtctccacaattttcgaaggattgaattcatactgacctcattctgtcatcataggacaatttagttaaaagttagtaagaaagtgctcattttaaaaagcatattttggaaatttaagcacacacttcaaaaataattcatgggttaagttaaactcataatagttatatgaaaatactgcaaattgagtgcttgaaagaaaacacacatattgaacattaaatgctatcatgaaaatggtacttagaggg

SEQ ID NO: 465 - DNA, 1052 bp, Homo sapien
  misc_feature (371)..(547): n=a, c, g or t
actaatttctagagtgataacccctggaggagatgattgtgagaaatgacaagatgatattagtgcattctgggtccaggcaaaatgtcagctgtttattataccatgaactcaaagtgagtctcaaagtgctggaattacaggtgtgagcccctgggcccagcctcatttatgtccaaaaattaaacatccagccatatcttatgagatgtattaaacttaagatgtgtgtccattggagaataaaaggagtggaaaaagatagatcaggcacatactaagtgaaggaaaacaagtgtctatatttttgtgagacttcaagtctataagaattatttagaatagagaagttcataataataaaaggttannnnnnnnnnnnnnnnnnnnnnnnnnnnnnnnnnnnnnnnnnnnnnnnnnnnnnnnnnnnnnnnnnnnnnnnnnnnnnnnnnnnnnnnnnnnnnnnnnnnnnnnnnnnnnnnnnnnnnnnnnnnnnnnnnnnnnnnnnnnnnnnnnnnnnnnnnnnnnnnnnnnnnnnnnnnnnnnnatagcctcaaaatatttaaagatcaatagaaccataagaagaaataagtaaatccactgaaacacagctcctaactattgataagtcaagtaaacagaaaatgagtaacaatacagaagatgtgaaacctagggctaacaagcttgctttatggtacatgcatagaatagtgtaagtaacaaagaaaacacattactcttaagcatgcaaggtgttctgtcaaaagtttaccacatattaagccacaaagcaggtctccacaattttcgaaggattgaattcatactgacctcattctgtcatcataggacaatttagttaaaagttagtaagaaagtgctcattttaaaaagcatattttggaaatttaagcacacacttcaaaaataattcatgggttaagttaaactcataatagttatatgaaaatactgcaaattgagtgcttgaaagaaaacacacatattgaacattaaatgctatcatgaaaatggtacttagaggg

SEQ ID NO: 466 - DNA, 760 bp, Homo sapien
  misc_feature (415)..(570): n=a, c, g or t
tgcttttctgtcactatggatttgttgcattttctggaattttgttgaatggaatcacatatactcttttctaatttatcttccacttaatataataaatttgagagtcattcattttattgcatgtgtcagttgtttctttttactgattggtgagttgtgttccattgtctaagtagtataccgttggtttgcaaatatcacatttttgtttatccatctgggttattttcagttttggcttttatgaatcaagttattacaaatgtgcttttcatcttcttgggtaaataactaggggtagaatgtctggagttgtgtggtacatgtatgtttatacagaattgctgagctgtttttaaaaaattgtctcatttaatagtcctaccagctgcttatgagagttcaagttccnnnnnnnnnnnnnnnnnnnnnnnnnnnnnnnnnnnnnnnnnnnnnnnnnnnnnnnnnnnnnnnnnnnnnnnnnnnnnnnnnnnnnnnnnnnnnnnnnnnnnnnnnnnnnnnnnnnnnnnnnnnnnnnnnnnnnnnnnnnnnnnnnnnnnnnnnnnngatgaagtgattgtccagatcttagttcatttgtcttcttgagttgttagggctctttttatattcagaatacagacttttgtcagaatgtgtgctgcaaatatgttgtccctctgtatgcttgccttttttgttttctcaacagtgtcttttaaaggagtagtaggttggctgttccagcacactgcgc

SEQ ID NO: 467 - DNA, 285 bp, Homo sapien
atttttcaagatatggcttggtagcttaatataaaatttagtgttcaactgaagactagagtggatgtcatgggctcctaaagctgtaaactgccacatgtaaaattttgatccagtaattagcaatctacagctttacaagttttgtagtgatatgaattgtgttgtctgttctcttcatactctgacatatagtatagtgctgccagacattgtgatacacagtcacgtgctgcataacaatattttggtcacgatgaaccacatatccagtgatagttcctt

SEQ ID NO: 468 - DNA, 560 bp, Homo sapien
  misc_feature (170)..(309): n=a, c, g or t
tgcacctggcctaaaaatccacgtgtaaaggtctcaaagttatgtgcatgccatggaaaatattcttaatttcctgtcacgtgtctgctacaaacccatcaaattcctacggcttggggcccagagagatggtgtcacacaccttgcagaattcctgaatctggaaagcnnnnnnnnnnnnnnnnnnnnnnnnnnnnnnnnnnnnnnnnnnnnnnnnnnnnnnnnnnnnnnnnnnnnnnnnnnnnnnnnnnnnnnnnnnnnnnnnnnnnnnnnnnnnnnnnnnnnnnnnnnnnnnnnnnnnnnnnnnnncacgtataatttccttttctaatattcactgggcacctgttttacgccatgtgcggtatgttccacgatcagcaaaacagatgcagcagtccctgcagtggggaaaactcagtccatgaacattcacaccagcagggggtgctgtctcgccttttaaccagggagcccctctgtgtccttctcaaggctgcccttgtccatttcaccttcttccaattcaaatcttgaaaactcacctctaaggcgaatgg

SEQ ID NO: 469 - DNA, 1911 bp, Homo sapien
atgctcctgtcataccctatcagtcaagaagttttagaagttttagatctgtgccaggaacccaggcccctgcaggcacttaagtttgtgagtccgctgcagaatgatggagtcaagagaggagctgaaaacacagacctctggctgatatctgaacaatcagactttaagattcaaaaagtatcgaccatgagaagtgaaagcatagcatctgcatcaaaagccttgatttgtcatggcacctacacactgaggatggggtgtatgtgtatgtatctgtctgtctcccccagttccctggaaaatcctaaaggcaattccaaggtggtggtggacagcggggacaacagtcacatatactctgagggaaaggaaccttcctctctgatcagaggagctctgatctcaagatgtaggagcaaacatctgctgcttttttcctctgtctttctgcctcttggcccgaaatgcaagcagtcacaggaagtacgtcctattctaatgtctcatctctgtggctggaaaagtaaaaaggggaaccccagggaaggaggaagtcatggagaaatcgacttacacaaatataaccaattgattcttggtaaagacctctggccttttaccagggtaactgtgcactggggaaagggaaatgatcagacatttcagggactacaggatactggctctgagctgatgctgattccaggggacccaaaacgtcactgtagtcctccagttaaagtagggtcttatggaggtcaggtaattaatggagttttagctcaggtgcgacttacagtggctgctgtatcagatgtggtttcactgcttgagcaaattaacatatctcctggtacctggtatgcagccatagacgtggcaaatgcctttttctccattcctgtccatatggcccatctgaagcaatttgccttcagctggcaaggccagcaatatacatttactgtcctgcctcagagaggatgggaaataaatccaactaaaattcagggaccttccacttcagtaaaatttctagggatccagtggtatggggcctgtcaagatattccttctaaggtgaaggaaaagttgctgcatttggctcctcctacaaccaagaaagaggcacaacgcctagtggacctatttggatttcggaggcaacacattcctcatgtgggtgtgttactctggcccatttatcaagtgacccgaaaggctgccagttttgagtggggtccagaacaggagaaggctctgcaacaggtccaggctgctgtgcaagctgctctgccacttgggccatatgacccagcagatccactagtgcttgaagtggatgctgtttggagccctcagcaggcccccataggtgaatcacagaggaggcctctaggattttggagcaaggctctgccgccttctgcaggtaactactctccttttgagagacagctctttgtctgttactgggctttgctggaaactgaacatttgactatgggtcatcaagtcaccatgcaacctgaactgcctatcatgaattgggtgccttctaaccaatctagctataaagtgggtcatgcacagcagcattctatcatcaaatggaagtggtatatacgtgattgcgctcgagcacatcctgaaggcacaatcaggattcacaggtccaggaatcaaggggtggaagtggaagtggtaccactcaccatcacccctagtgatccactagcaaaagctttgcttcctgttcccgcaacattatgttctgctggcacaggggtcttagtgccagagggaggaacgctgccaccaggagacacaacgatgattccattaaactggaagttgagattgccacctggacactttgggctcctcctacctttaagtcaagactaa

SEQ ID NO: 470 - DNA, 71 bp, Homo sapien
cttgaagatcactttctctgcttgcttagctgttcttcaagcaggagaaaatatgctgtatttatgtgatt

SEQ ID NO: 471 - DNA, 4707 bp, Homo sapien
tgacagctatttaaaaacaagaaaggcaatattaaatcatctttaaaactagaatcctattttaaaactttccttctacaaaaaggaaatccctaagtgagctttctgaatccaatgttaatatactactacagcctatacttcctgaatctaaaatgccaacacaggtagcttcccatccactctgcagattcaaaggaagacacatcccttctacaaaagtaaatcttcaatatgttctatggatccattcattctgcttcatttttgcccatctctccttaaaaatctgaaaatgtttttccccttctctttttttcttctttcttcaaggaaaataaaaaagcaaaaaaccttcactagcccctccagtttatgccttcccctagactcactctctctgtactgctacatggcaccactcaggcagggtgacaagcaagcagcatttggcctacaatgctacctggtgaccagtgcacagaaagacttctttcctttctgctgggactgtgcatcaatcatgctcattcattttcctttcactatgcacaatgcaactaatgccatctaaggtggtaacactttttaaataataacatttgaagccaggtgcaatggctcacacctgtaatcccaacactttgggaggccaaggcagacacaagcgctggtgtgaggaaaccgcagtgcaatgctgattctacaccatcctgcactgaaaggcttccgggattatacctgcccacagcccagcctcccctcactgacctcatcacagtgcagaaatccccaagctcaggtggatttcagaggaagaaggtggacagggcaggccagctccttggggctgtgcagggaccagaaaataccatctgtgaaaaagacgtggttctccagggggcttacaacctggagctgtcacagcctccagcccttccgggtgcttccattatacccagttttgtgtgcacctcactcctgtttcctgtggcaatctctggagctcagcaggaaagggtacggcacccatgggctgttcatgtgggcttcatggctgttctggagcagagcctcccagagggttcgatcgcctccaactctgaccaggtgtttgtgtgctttctgggcctggctgacacccatcacaggactgaacacttctggcgttccaaagtcttcaggtacatcaagaagccacggtatcctctcaaagccaccaggtctccagctgggacccacctcccaaagcgttgtgattataggtgtgaaccaccgcacggccgagaatgtgttcttgactggcatgttcagggaagcttcctggaggaggagacgtataagcaggcccttgaaggaccagcagagtccacagagatccagaggaagggaagccatggtcccttggtgggagctgagctgtgtcctcgaggggtgtggactgtggacattgttcacaggaaccagagacatcactctttaggattctaccagcaacacctgaattggctcgacatttgtggagttctggagagtcttggcttctgggaggaagtcagagggattatctcaggatcagagctgataacgggattcccttgggccttcaaggtgccaggcctgccccagtacctccagagcctcaccagactagccattgctgcagtgtgggccgcggcagccaagagtggagagcgggagacgaatgtccccatctctttctctcagctgttagaatctgccttccctgaagtgcgctcactaacactggaagccctcttggaaaagttcttagcagcagcctctggacttggagagaagggcgtgccacccttgctgtgcaacatgggagagaagttcttattgttggccatgaaggaaaatcacccagaatgcttctgcaagaacagggaattgatagctgctgagctgaagcagtgggttcagctggtcatcttgtcatgtgaagaccatcttcctacagagtctaggctggccgtcgttgaagtcctcaccagtactacaccacttttcctcaccaacccccatcctattcttgagttgcaggatacacttgctctctggaagtgtgtccttacccttctgcagagtgaggagcaagctgttagagatgcagccacggaaaccgtgacaactgccatgtcacaagaaaatacctgccagtcaacagagtttgccttctgccaggtggatgcctccatcgctctggccctggccctggccgtcctgtgtgatctgctccagcagtgggaccagttggcccctggactgcccatcctgctgggatggctgttgggagagagtgatgacctcgtggcctgtgtggagagcatgcatcagcaggccaagggttcaaaacgcattgtccctctttatgagaaatttggagacatggccccggcgctcaagccctgtttactgagcctgggcggggagggggcggagaaacgagcccgggctccaccggcaagactgccgcggcggccgcccgcgtggccacccccacccccaccgcgactccacgtgcagtcgggctggagccgccaccgactggacgcaggccccgagcccccgcctcctggccggggcaccctttgcaaacccgccgggccgcggggatggttgcgatattctggcattttgcaattcccgcgcccagtacaaaaccgaaggtgggagcttaaagctccacaggtccgcctcggagaacagggcagggaaagacacgtccagggctgcagaatcccggccacgctaaacgtaccggggctctccgaccgcgcagccccggaggagaacagccgtgccttcccgccgccacccggcggcatccactggggccgagagctacacgccacaccggccgcccgggccgccggccccgcccggaggcctccagcaccctcccccggaggaaaaaaattggcggcggccaatgggaggccgggaaggcgcctgacgtccgcgagcgggcgggcggcgttgcctggagaccccggcgggggccgagttctgtcccctcccccggcgcgcccgccccgccgcagccgcactcccgggctctatatagggcgcgcgctcggaggccgccgagttccagcagtccgcgagctgccgtcggctccgcggggggggcgggccgggcaccccggggcgcggaggagcgctcctcgcttctctccttcccccctgccgcactccgccggaccctcccgacggctcgtgtcgctgcactcgccctctcctctcgcccctcggcaaactttcggcccctccccgccctcgcccgttattcgtcgtggctcaagccggccacgccccccaagggctcctcccgacctcccggcctgccgctccggccactgcgggatccagaaacatgtcgaccacacttctgtccgccttctacgatgtcgacttcttgtgcaagacagagaaatccctggccaacctcaacctgaacaacatgctggacaagaaggcggtggggacgcctgtgccgccgcccccagctcgggcttcgcgccgggattcctccgacggcactcggccagcaacctgcatgcactcgcccaccccgcgcccagccccggcagctgctcgcccaagttcccgggcgccgctaacggcagcagctgcggcagcgcggcggccggcggagccgtcggggggcggcgcacagccctgctcaacaaggagaacaaattccgggaccgctcgtttagcgagaacggcgatcgcagccagcacctcctgcacctgcagcagcagcagaaggggggcggcggctcccagatcaactccacgcgctacaagaccgagctgtgccggcccttcgaggagagcggcacgtgcaagtacggcgaaaagtgccagttcgcgcatggcttccacgagctgcgcagcctgactcgccatccgaagtacaagaccgagctgtgccgcacctttcataccatcggcttctgcccctatgggccgcgctgccacttcatccacaacgcggacgagcggcggcccgcgccgtcggggggccctccggggacctgcccccacgtcgcgcacgccgccgccgccctcctgctcttcggcctcgtcctgctcctcctccgcctcctcctgttcctcggcctccgcggcctccacgccctcgggcgccccgacatgctgcgcctccgcgccggccgcggctgcggccgctctgctgtacggcaccgggggcgccgaggacctgctggcgccgggggccccgtgcgcggcctgctcgtcggcctcgtgcgccaacaacgccttcgccttcggtccggagctcagcagcctcatcacgccgctcgccatccagacccacaactttgccgccgtggccgccgccgcctactaccgcagtcagcagcagcagcagcagcagggcctggcgcccccgcgagcgccgggccgcccagcgcgaccctccccgccggggccgccgcacctccctcgccgcccttcagcttccagctgccgcgccgcctgtccgactcgcccgtgttcgacgcgccccccagccccccggactcgctgtcggaccgcgacagctacctaagcggctccctgagctccggcagcctcagcggctctgagtctcccagcctcgaccctggccgccgcctgccaatcttcagccgcctctccatctccgacgactga

SEQ ID NO: 472 - DNA, 1400 bp, Homo sapien
  misc_feature (255)..(387): n=a, c, g or t
cggccccacttgtcttcaggaatttaatgattattccagcttacttgtcatactggtgtctatttgcatctgtcctatgtaagtgcatctgtcctctttctccttgcaagtgcttgttttccctcacattttgactcagttcttggcaacctggttgctataaaaataaagtcatgactttgaagttagttgggttctttcattgttgtaaggttaggagccctattccatcccagctctccaaaacccagaatnnnnnnnnnnnnnnnnnnnnnnnnnnnnnnnnnnnnnnnnnnnnnnnnnnnnnnnnnnnnnnnnnnnnnnnnnnnnnnnnnnnnnnnnnnnnnnnnnnnnnnnnnnnnnnnnnnnnnnnnnnnnnnnnnnnnnccccaaatcccttttcatttcttattttctttatggttttagaaaatgtagtttacgtaattgcagcttgactttttcctcagttaatggcatgcttattggagagaaaaaagattaactatatttccctttttaattactgtgcttttttcttttttaaggtaatatttcattacattaaattttagtgttattctactgagctattccttaaatattatagtattttggatttcacatataaatttgtaacacatcttgagtttattatgtatagagtaaggctattttctttttttgttttttaaggtaaaaatcacataatataaaattaataacaaccattttaaagcatacaatgcagttgcttttagtatattcacaatgttccaggacaatttcatcatgtcccttctaaaaacccattatccataaagttgttacaccctattctgcttccctgagccctatatgaccactaaatctgatttatatcccaattgattgcccaatttcctgatgttctcatctgaataaacatcaggtaatattgtgtcttttgtgcacttaatgcttcaaattttccacccactattataccatgtttaaagtacttcttactttgttatagctaaaaatggggtgtccatttatgagtcaacaagcctatggatggttccactttttgactgtttgattattactggtgtagatattcttgcaccctgtgtgttattgagcaacctaatatttgtagattaccgctgactaagcagcaccactggaggcacaggcgtgaatactttttcaacgatctaggaaaacgtcgccccatcctttcgcattttttcaaatgagtcaccagattgccgataaaagattattgaggtggtggaccccataaaaaacaaacaaaattggcgccccgcgaattaaaatgtggcggcagaattaagtcacttctccgcacggatgttgacagacgggcggctaattgtgtcgatacttacgag

SEQ ID NO: 473 - protein, 55 aa, Homo sapien
MSLPLLGLIYLPSHFLSVFFCLVNSSGPFAYKSLISASLVLLIEHTSLPFVLSTQ

SEQ ID NO: 474 - protein, 2311 aa, Homo sapien
MGGGGGGGGARLRRGDASPVRPRRGLHAPLARSLPPPAPRPAMAEPSSARRPVPLIESELYFLIARYLSAGPCRRAAQVLVQELEQYQLLPKRLDWEGNEHNRSYEELVLSNKHVAPDHLLQICQRIGPMLDKEIPPSISRVTSLLGAGRQSLLRTAKDCRHTVWKGSAFAALHRGRPPEMPVNYGSPPNLVEIHRGKQLTGCSTFSTAFPGTMYQHIKMHRRILGHLSAVYCVAFDRTGHRIFTGSDDCLVKIWSTHNGRLLSTLRGHSAEISDMAVNYENTMIAAGSCDKIIRVWCLRTCAPVAVLQGHTGSITSLQFSPMAKGSQRYMVSTGADGTVCFWQWDLESLKFSPRPLKFTEKPRPGVQMLCSSFSVGGMFLATGSTDHVIRMYFLGFEAPEKIAELESHTDKVDSIQFCNNGDRFLSGSRDGTARIWRFEQLEWRSILLDMATRISGDLSSEEERFMKPKVTMIAWNQNDSIVVTAVNDHVLKVWNSYTGQLLHNLMGHADEVFVLETHPFDSRIMLSAGHDGSIFIWDITKGTKMKHYFNMIEGQGHGAVFDCKFSQDGQHFACTDSHGHLLIFGFGCSKPYEKIPDQMFFHTDYRPLIRDSNNYVLDEQTQQAPHLMPPPFLVDVDGNPHPTKYQRLVPGRENSADEHLIPQLGYVATSDGEVIEQIISLQTNDNDERSPESSILDGMIRQLQQQQDQRMGADQDTIPRGLSNGEETPRRGFRRLSLDIQSPPNIGLRRSGQVEGVRQMHQNAPRSQIATERDLQAWKRRVVVPEVPLGIFRKLEDFRLEKGEEERNLYIIGRKRKTLQLSHKSDSVVLVSQSRQRTCRRKYPNYGRRNRSWRELSSGNESSSSVRHETSCDQSEGSGSSEEDEWRSDRKSESYSESSSDSSSRYSDWTADAGINLQPPLRTSCRRRITRFCSSSEDEISTENLSPPKRRRKRKKENKPKKENLRRMTPAELANMEHLYEFHPPVWITDTTLRKSPFVPQMGDEVIYFRQGHEAYIEAVRRNNIYELNPNKEPWRKMDLRDQELVKIVGIRYEVGPPTLCCLKLAFIDPATGKLMDKSFSIRYHDMPDVIDFLVLRQFYDEARQRNWQSCDRFRSIIDDAWWFGTVLSQEPYQPQYPDSHFQCYIVRWDNTEIEKLSPWDMEPIPDNVDPPEELGASISVTTDELEKLLYKPQAGEWGQKSRDEECDRIISGIDQLLNLDIAAAFAGPVDLCTYPKYCTVVAYPTDLYTIRMRLVNRFYRRLSALVWEVRYIEHNARTFNEPESVIARSAKKITDQLLKFIKNQHCTNISELSNTSENDEQNAEDLDDSDLPKTSSGRRRVHDGKKSIRATNYVESNWKKQCKELVNLIFQCEDSEPFRQPVDLVEYPDYRDIIDTPMDFGTVRETLDAGNYDSPLEFCKDIRLIFSNAKAYTPNKRSKIYSMTLRLSALFEEKMKKISSDFKIGQKFNEKLRRSQRFKQRQNCKGDSQPNKSIRNLKPKRLKSQTKIIPELVGSPTQSTSSRTAYLGTHKTSAGISSGVTSGDSSDSAESSERRKRNRPITNGSTLSESEVEDSLATSLSSSASSSSEESKESSRARESSSRSGLSRSSNLRVTRTRAAQRKTGPVSLANGCGRKATRKRVYLSDSDNNSLETGEILKARAGNNRKVLRKCAAVAANKIKLMSDVEENSSSESVCSGRKLPHRNASAVARKKLLHNSEDEQSLKSEIEEEELKDENQLLPVSSSHTAQSNVDESENRDSESESDLRVARKNWHANGYKSHTPAPSKTKFLKIESSEEDSKSHDSDHACNRTAGPSTSVQKLKAESISEEADSEPGRSGGRKYNTFHKNASFFKKTKILSDSEDSESEEQDREDGKCHKMEMNPISGNLNCDPIAMSQCSSDHGCETDLDSDDDKIEKPNNFMKDSASQDNGLSRKISRKRVCSSDSDSSLQVVKKSSKARTGLLRITRRCAATAANKIKLMSDVEDVSLENVHTRSKNGRKKPLHLACTTAKKKLSDCEGSVHCEVPSEQYACEGKPPDPDSEGSTKVLSQALNGDSDSEDMLNSEHKHRHTNIHKIDAPSKRKSSSVTSSGEDSKSHIPGSETDRTFSSESTLAQKATAENNFEVELNYGLRRWNGRRLRTYGKAPFSKTKVIHDSQETAEKEVKRKRSHPELENVKISETTGNSKFRPDTSSKSSDLGSVTESDIDCTDNTKTKRRKTKGKAKVVRKGKTFTANISKTVRRQRQSKRPRLSVDDNDWEDLDYAKSKRVLRRSKIKTRNQGRRTVRYHDGDDDRSLENVLDFNGCTL

SEQ ID NO: 475 - protein, 162 aa, Homo sapien
MGGGGGGGGARLRRGDASPVRPRRGLHAPLARSLPPPAPRPAMAEPSSARRPVPLIESELYFLIARYLSAGPCRRAAQVLVQELEQYQLLPKRLDWEGNEHNRSYEELVLSNKHVAPDHLLQICQRIGPMLDKEIPPSISRVTSLLGAGRQSLLRTAKGTLI

SEQ ID NO: 476 - protein, 2324 aa, Homo sapien
MAEPSSARRPVPLIESELYFLIARYLSAGPCRRAAQVLVQELEQYQLLPKRLDWEGNEHNRSYEELVLSNKHVAPDHLLQICQRIGPMLDKEIPPSISRVTSLLGAGRQSLLRTAKDCRHTVWKGSAFAALHRGRPPEMPVNYGSPPNLVEIHRGKQLTGCSTFSTAFPGTMYQHIKMHRRILGHLSAVYCVAFDRTGHRIFTGSDDCLVKIWSTHNGRLLSTLRGHSAEISDMAVNYENTMIAAGSCDKIIRVWCLRTCAPVAVLQGHTGSITSLQFSPMAKGSQRYMVSTGADGTVCFWQWDLESLKFSPRPLKFTEKPRPGVQMLCSSFSVGGMFLATGSTDHVIRMYFLGFEAPEKIAELESHTDKVDSIQFCNNGDRFLSGSRDGTARIWRFEQLEWRSILLDMATRISGDLSSEEERFMKPKVTMIAWNQNDSIVVTAVNDHVLKVWNSYTGQLLHNLMVGNFWYNVTNEDFLKYDCNFEAIKIIYGTSCFSHVNYEMIRNFYNYKLLSNTFLKVYAVTVCIFKFSICNLKTLLNVMTLLNKGHADEVFVLETHPFDSRIMLSAGHDGSIFIWDITKGTKMKHYFNMIEGQGHGAVFDCKFSQDGQHFACTDSHGHLLIFGFGCSKPYEKIPDQMFFHTDYRPLIRDSNNYVLDEQTQQAPHLMPPPFLVDVDGNPHPTKYQRLVPGRENSADEHLIPQLGYVATSDGEVIEQIISLQTNDNDERSPESSILDGMIRQLQQQQDQRMGADQDTIPRGLSNGEETPRRGFRRLSLDIQSPPNIGLRRSGQVEGVRQMHQNAPRSQIATERDLQAWKRRVVVPEVPLGIFRKLEDFRLEKGEEERNLYIIGRKRKTLQLSHKSDSVVLVSQSRQRTCRRKYPNYGRRNRSWRELSSGNESSSSVRHETSCDQSEGSGSSEEDEWRSDRKSESYSESSSDSSSRYSDWTADAGINLQPPLRTSCRRRITRFCSSSEDEISTENLSPPKRRRKRKKENKPKKENLRRMTPAELANMEHLYEFHPPVWITDTTLRKSPFVPQMGDEVIYFRQGHEAYIEAVRRNNIYELNPNKEPWRKMDLRYPEKQTLGGRLTMANPFDGYSIQDQELVKIVGIRYEVGPPTLCCLKLAFIDPATGKLMDKSFSIRYHDMPDVIDFLVLRQFYDEARQRNWQSCDRFRSIIDDAWWFGTVLSQEPYQPQYPDSHFQCYIVRWDNTEIEKLSPWDMEPIPDNVDPPEELGASISVTTDELEKLLYKPQAGEWGQKSRDEECDRIISGIDQLLNLDIAAAFAGPVDLCTYPKYCTVVAYPTDLYTIRMRLVNRFYRRLSALVWEVRYIEHNARTFNEPESVIARSAKKITDQLLKFIKNQHCTNISELSNTSENDEQNAEDLDDSDLPKTSSGRRRVHDGKKSIRATNYVESNWKKQCKELVNLIFQCEDSEPFRQPVDLVEYPDYRDIIDTPMDFGTVRETLDAGNYDSPLEFCKDIRLIFSNAKAYTPNKRSKIYSMTLRLSALFEEKMKKISSDFKIGQKFNEKLRRSQRFKQRQNCKGDSQPNKSIRNLKPKRLKSQTKIIPELVGSPTQSTSSRTAYLGTHKTSAGISSGVTSGDSSDSAESSERRKRNRPITNGSTLSESEVEDSLATSLSSSASSSSEESKESSRARESSSRSGLSRSSNLRVTRTRAAQRKTGPVSLANGCGRKATRKRVYLSDSDNNSLETGEILKARAGNNRKVLRKCAAVAANKIKLMSDVEENSSSESVCSGRKLPHRNASAVARKKLLHNSEDEQSLKSEIEEEELKDENQLLPVSSSHTAQSNVDESENRDSESESDLRVARKNWHANGYKSHTPAPSKTKFLKIESSEEDSKSHDSDHACNRTAGPSTSVQKLKAESISEEADSEPGRSGGRKYNTFHKNASFFKKTKILSDSEDSESEEQDREDGKCHKMEMNPISGNLNCDPIAMSQCSSDHGCETDLDSDDDKIEKPNNFMKDSASQDNGLSRKISRKRVCSSDSDSSLQVVKKSSKARTGLLRITRRCAATAANKIKLMSDVEDVSLENVHTRSKNGRKKPLHLACTTAKKKLSDCEGSVHCEVPSEQYACEGKPPDPDSEGSTKVLSQALNGDSDSEDMLNSEHKHRHTNIHKIDAPSKRKSSSVTSSGEDSKSHIPGSETDRTFSSESTLAQKATAENNFEVELNYGLRRWNGRRLRTYGKAPFSKTKVIHDSQETAEKEVKRKRSHPELENVKISETTGNSKFRPDTSSKSSDLGSVTESDIDCTDNTKTKRRKTKGKAKVVRKVLLELCLPAHFKENQLKNNHTFCLLKAI

SEQ ID NO: 477 - protein, 520 aa, Homo sapien
MGGGGGGGGARLRRGDASPVRPRRGLHAPLARSLPPPAPRPAMAEPSSARRPVPLIESELYFLIARYLSAGPCRRAAQVLVQELEQYQLLPKRLDWEGNEHNRSYEELVLSNKHVAPDHLLQICQRIGPMLDKEIPPSISRVTSLLGAGRQSLLRTAKDCRHTVWKGSAFAALHRGRPPEMPVNYGSPPNLVEIHRGKQLTGCSTFSTAFPGTMYQHIKMHRRILGHLSAVYCVAFDRTGHRIFTGSDDCLVKIWSTHNGRLLSTLRGHSAEISDMAVNYENTMIAAGSCDKIIRVWCLRTCAPVAVLQGHTGSITSLQFSPMAKGSQRYMVSTGADGTVCFWQWDLESLKFSPRPLKFTEKPRPGVQMLCSSFSVGGMFLATGSTDHVIRMYFLGFEAPEKIAELESHTDKVDSIQFCNNGDRFLSGSRDGTARIWRFEQLEWRSILLDMATRISGDLSSEEERFMKPKVTMIAWNQNDSIVVTAVNDHVLKVWNSYTGQLLHNLMVGNFWYNVTNEIF

SEQ ID NO: 478 - protein, 385 aa, Homo sapien
MGGGGGGGGARLRRGDASPVRPRRGLHAPLARSLPPPAPRPAMAEPSSARRPVPLIESELYFLIARYLSAGPCRRAAQVLVQELEQYQLLPKRLDWEGNEHNRSYEELVLSNKHVAPDHLLQICQRIGPMLDKEIPPSISRVTSLLGAGRQSLLRTAKDCRHTVWKGSAFAALHRGRPPEMPVNYGSPPNLVEIHRGKQLTGCSTFSTAFPGTMYQHIKMHRRILGHLSAVYCVAFDRTGHRIFTGSDDCLVKIWSTHNGRLLSTLRGHSAEISDMAVNYENTMIAAGSCDKIIRVWCLRTCAPVAVLQGHTGSITSLQFSPMAKGSQRYMVSTGADGTVCFWQWDLESLKFSPRPLKFTEKPRPGVQMLCSSFSVGKNFFTFFS

SEQ ID NO: 479 - protein, 164 aa, Homo sapien
MSLLGDRFRSIIDDAWWFGTVLSQEPYQPQYPDSHFQCYIVRWDNTEIEKLSPWDMEPIPDNVDPPEELGASISVTTDELEKLLYKPQAGEWGQKSRDEECDRIISGIDQLLNLDIAAAFAGPVDLCTYPKYCTVVAYPTDLYTIRMRLVNRFYRLVETCFQNV

SEQ ID NO: 480 - protein, 2362 aa, Homo sapien
MGGGGGGGGARLRRGDASPVRPRRGLHAPLARSLPPPAPRPAMAEPSSARRPVPLIESELYFLIARYLSAGPCRRAAQVLVQELEQYQLLPKRLDWEGNEHNRSYEELVLSNKHVAPDHLLQICQRIGPMLDKEIPPSISRVTSLLGAGRQSLLRTAKDCRHTVWKGSAFAALHRGRPPEMPVNYGSPPNLVEIHRGKQLTGCSTFSTAFPGTMYQHIKMHRRILGHLSAVYCVAFDRTGHRIFTGSDDCLVKIWSTHNGRLLSTLRGHSAEISDMAVNYENTMIAAGSCDKIIRVWCLRTCAPVAVLQGHTGSITSLQFSPMAKGSQRYMVSTGADGTVCFWQWDLESLKFSPRPLKFTEKPRPGVQMLCSSFSVGGMFLATGSTDHVIRMYFLGFEAPEKIAELESHTDKVDSIQFCNNGDRFLSGSRDGTARIWRFEQLEWRSILLDMATRISGDLSSEEERFMKPKVTMIAWNQNDSIVVTAVNDHVLKVWNSYTGQLLHNLMGHADEVFVLETHPFDSRIMLSAGHDGSIFIWDITKGTKMKHYFNMIEGQGHGAVFDCKFSQDGQHFACTDSHGHLLIFGFGCSKPYEKIPDQMFFHTDYRPLIRDSNNYVLDEQTQQAPHLMPPPFLVDVDGNPHPTKYQRLVPGRENSADEHLIPQLGYVATSDGEVIEQIISLQTNDNDERSPESSILDGMIRQLQQQQDQRMGADQDTIPRGLSNGEETPRRGFRRLSLDIQSPPNIGLRRSGQVEGVRQMHQNAPRSQIATERDLQAWKRRVVVPEVPLGIFRKLEDFRLEKGEEERNLYIIGRKRKTLQLSHKSDSVVLVSQSRQRTCRRKYPNYGRRNRSWRELSSGNESSSSVRHETSCDQSEGSGSSEEDEWRSDRKSESYSESSSDSSSRYSDWTADAGINLQPPLRTSCRRRITRFCSSSEDEISTENLSPPKRRRKRKKENKPKKENLRRMTPAELANMEHLYEFHPPVWITDTTLRKSPFVPQMGDEVIYFRQGHEAYIEAVRRNNIYELNPNKEPWRKMDLRDQELVKIVGIRYEVGPPTLCCLKLAFIDPATGKLMDKSFSIRYHDMPDVIDFLVLRQFYDEARQRNWQSCDRFRSIIDDAWWFGTVLSQEPYQPQYPDSHFQCYIVRWDNTEIEKLSPWDMEPIPDNVDPPEELGASISVTTDELEKLLYKPQAGEWGQKSRDEECDRIISGIDQLLNLDIAAAFAGPVDLCTYPKYCTVVAYPTDLYTIRMRLVNRFYRRLSALVWEVRYIEHNARTFNEPESVIARSAKKITDQLLKFIKNQHCTNISELSNTSENDEQNAEDLDDSDLPKTSSGRRRVHDGKKSIRATNYVESNWKKQCKELVNLIFQCEDSEPFRQPVDLVEYPDYRDIIDTPMDFGTVRETLDAGNYDSPLEFCKDIRLIFSNAKAYTPNKRSKIYSMTLRLSALFEEKMKKISSDFKIGQKFNEKLRRSQRFKQRQNCKGDSQPNKSIRNLKPKRLKSQTKIIPELVGSPTQSTSSRTAYLGTHKTSAGISSGVTSGDSSDSAESSERRKRNRPITNGSTLSESEVEDSLATSLSSSASSSSEESKESSRARESSSRSGLSRSSNLRVTRTRAAQRKTGPVSLANGCGRKATRKRVYLSDSDNNSLETGEILKARAGNNRKVLRKCAAVAANKIKLMSDVEENSSSESVCSGRKLPHRNASAVARKKLLHNSEDEQSLKSEIEEEELKDENQLLPVSSSHTAQSNVDESENRDSESESDLRVARKNWHANGYKSHTPAPSKTKFLKIESSEEDSKSHDSDHACNRTAGPSTSVQKLKAESISEEADSEPGRSGGRKYNTFHKNASFFKKTKILSDSEDSESEEQDREDGKCHKMEMNPISGNLNCDPIAMSQCSSDHGCETDLDSDDDKIEKPNNFMKDSASQDNGLSRKISRKRVCSSDSDSSLQVVKKSSKARTGLLRITRRCAATAANKIKLMSDVEDVSLENVHTRSKNGRKKPLHLACTTAKKKLSDCEGSVHCEVPSEQYACEGKPPDPDSEGSTKVLSQALNGDSDSEDMLNSEHKHRHTNIHKIDAPSKRKSSSVTSSGEDSKSHIPGSETDRTFSSESTLAQKATAENNFEVELNYGLRRWNGRRLRTYGKAPFSKTKVIHDSQETAEKEVKRKRSHPELENVKISETTGNSKFRPDTSSKSSDLGSVTESDIDCTDNTKTKRRKTKGKAKVVRKEFVPRDREPNTKVRTCMHNQKDAVQMPSETLKAKMVPEKVPRRCATVAANKIKIMSNLKETISGPENVWIRKSSRKLPHRNASAAAKKKLLNVYKEDDTTINSESEKELEDINRKMLFLRGFRSWKENAQ

SEQ ID NO: 481 - protein, 2375 aa, Homo sapien [sequence omitted]

SEQ ID NO: 482 - protein, 2001 aa, Homo sapien
MAEPSSARRPVPLIESELYFLIARYLSAGPCRRAAQVLVQELEQYQLLPKRLDWEGNEHNRSYEELVLSNKHVAPDHLLQICQRIGPMLDKEIPPSISRVTSLLGAGRQSLLRTAKDCRHTVWKGSAFAALHRGRPPEMPVNYGSPPNLVEIHRGKQLTGCSTFSTAFPGTMYQHIKMHRRILGHLSAVYCVAFDRTGHRIFTGSDDCLVKIWSTHNGRLLSTLRGHSAEISDMAVNYENTMIAAGSCDKIIRVWCLRTCAPVAVLQGHTGSITSLQFSPMAKGSQRYMVSTGADGTVCFWQWDLESLKFSPRPLKFTEKPRPGVQMLCSSFSVGGMFLATGSTDHVIRMYFLGFEAPEKIAELESHTDKVDSIQFCNNGDRFLSGSRDGTARIWRFEQLEWRSILLDMATRISGDLSSEEERFMKPKVTMIAWNQNDSIVVTAVNDHVLKVWNSYTGQLLHNLMVGNFWYNVTNEDFLKYDCNFEAIKIIYGTSCFSHVNYEMIRNFYNYKLLSNTFLKVYAVTVCIFKFSICNLKTLLNVMTLLNKGHADEVFVLETHPFDSRIMLSAGHDGSIFIWDITKGTKMKHYFNMIEGQGHGAVFDCKFSQDGQHFACTDSHGHLLIFGFGCSKPYEKIPDQMFFHTDYRPLIRDSNNYVLDEQTQQAPHLMPPPFLVDVDGNPHPTKYQRLVPGRENSADEHLIPQLGYVATSDGEVIEQIISLQTNDNDERSPESSILDGMIRQLQQQQDQRMGADQDTIPRGLSNGEETPRRGFRRLSLDIQSPPNIGLRRSGQVEGVRQMHQNAPRSQIATERDLQAWKRRVVVPEVPLGIFRKLEDFRLEKGEEERNLYIIGRKRKTLQLSHKSDSVVLVSQSRQRTCRRKYPNYGRRNRSWRELSSGNESSSSVRHETSCDQSEGSGSSEEDEWRSDRKSESYSESSSDSSSRYSDWTADAGINLQPPLRTSCRRRITRFCSSSEDEISTENLSPPKRRRKRKKENKPKKENLRRMTPAELANMEHLYEFHPPVWITDTTLRKSPFVPQMGDEVIYFRQGHEAYIEAVRRNNIYELNPNKEPWRKMDLRYPEKQTLGGRLTMANPFDGYSIQDQELVKIVGIRYEVGPPTLCCLKLAFIDPATGKLMDKSFSIRYHDMPDVIDFLVLRQFYDEARQRNWQSCDRFRSIIDDAWWFGTVLSQEPYQPQYPDSHFQCYIVRWDNTEIEKLSPWDMEPIPDNVDPPEELGASISVTTDELEKLLYKPQAGEWGQKSRDEECDRIISGIDQLLNLDIAAAFAGPVDLCTYPKYCTVVAYPTDLYTIRMRLVNRFYRRLSALVWEVRYIEHNARTFNEPESVIARSAKKITDQLLKFIKNQHCTNISELSNTSENDEQNAEDLDDSDLPKTSSGRRRVHDGKKSIRATNYVESNWKKQCKELVNLIFQCEDSEPFRQPVDLVEYPDYRDIIDTPMDFGTVRETLDAGNYDSPLEFCKDIRLIFSNAKAYTPNKRSKIYSMTLRLSALFEEKMKKISSDFKIGQKFNEKLRRSQRFKQRQNCKGDSQPNKSIRNLKPKRLKSQTKIIPELVGSPTQSTSSRTAYLGTHKTSAGISSGVTSGDSSDSAESSERRKRNRPITNGSTLSESEVEDSLATSLSSSASSSSEESKESSRARESSSRSGLSRSSNLRVTRTRAAQRKTGPVSLANGCGRKATRKRVYLSDSDNNSLETGEILKARAGNNRKVLRKCAAVAANKIKLMSDVEENSSSESVCSGRKLPHRNASAVARKKLLHNSEDEQSLKSEIEEEELKDENQLLPVSSSHTAQSNVDESENRDSESESDLRVARKNWHANGYKSHTPAPSKTKFLKIESSEEDSKSHDSDHACNRTAGPSTSVQKLKAESISEEADSEPGRSGGRKYNTFHKNASFFKKTKILSDSEDSESEEQDREDGKCHKMEMNPISGNLNCDPIAMSQCSSDHGCETDLDSDDDKIEKPNNFMKGNSKHLSLFTD

SEQ ID NO: 483 - protein, 65 aa, Homo sapien [sequence omitted]

SEQ ID NO: 484 - protein, 67 aa, Homo sapien [sequence omitted]

SEQ ID NO: 485 - protein, 33 aa, Homo sapien
MISLGNNLDTMKVYNRERWLLISYKNYETLCSI

SEQ ID NO: 486 - protein, 108 aa, Homo sapien [sequence omitted]

SEQ ID NO: 487 - protein, 108 aa, Homo sapien [sequence omitted]

SEQ ID NO: 488 - protein, 46 aa, Homo sapien
MKFQLAKPRWHWQLSLQTTLCRRHHKTQMKDRKHITMYGFHFCLEK

SEQ ID NO: 489 - protein, 128 aa, Homo sapien
EPLVIELFTFIIANPETKGPLGDSHLGEIWVHSAHNASGYFTIYGDESLQSDHFNSRLSFGDTQTIWARTGYLGFLRRTELTDANGERHDALYVVGALDEAMELRGMRYHPIDIETSVIRAHKSVTEW

SEQ ID NO: 490 - protein, 1604 aa, Homo sapien
MALPLEVRARLAELELELSEGDITQKGYEKKRSKLIGAYLPQPPTANGAAVVRCRLQHSEGAPRRTFRSAHIGVCDVREAAARERVASTAGNRPLFYFRFGVDQALPQERRAPVTPSSASRYHRRRSSGSRDERYRSDVHTEAVQAALAKHKERKMAVPMPSKRRSLVVQTSMDAYTPPDTSSGSEDEGSVQGDSQGTPTSSQGSINMEHWISQAIHGSTTSTTSSSSTQSGGSGAAHRLADVMAQTHIENHSAPPDVTTYTSEHSIQVERPQGSTGSRTAPKYGNAELMETGDGVPVSSRVSAKIQQLVNTLKRPKRPPLREFFVDDFEELLEVQQPDPNQPKPEGAQMLAMRGEQLGVVTNWPPSLEAALQRWGTISPKAPCLTTMDTNGKPLYILTYGKLWTRSMKVAYSILHKLGTKQEPMVRPGDRVALVFPNNDPAAFMAAFYGCLLAEVVPVPIEVPLTRKDAGSQQIGFLLGSCGVTVALTSDACHKGLPKSPTGEIPQFKGWPKLLWFVTESKHLSKPPRDWFPHIKDANNDTAYIEYKTCKDGSVLGVTVTRTALLTHCQALTQACGYTEAETIVNVLDFKKDVGLWHGILTSVMNMMHVISIPYSLMKVNPLSWIQKVCQYKAKVACVKSRDMHWALVAHRDQRDINLSSLRMLIVADGANPWSISSCDAFLNVFQSKGLRQEVICPCASSPEALTVAIRRPTDDSNQPPGRGVLSMHGLTYGVIRVDSEEKLSVLTVQDVGLVMPGAIMCSVKPDGVPQLCRTDEIGELCVCAVATGTSYYGLSGMTKNTFEVFPMTSSGAPISEYPFIRTGLLGFVGPGGLVFVVGKMDGLMVVSGRRHNADDIVATALAVEPMKFVYRGRIAVFSVTVLHDERIVIVAEQRPDSTEEDSFQWMSRVLQAIDSIHQVGVYCLALVPANTLPKTPLGGIHLSETKQLFLEGSLHPCNVLMCPHTCVTNLPKPRQKQPEIGPASVMVGNLVSGKRIAQASGRDLGQIEDNDQARKFLFLSEVLQWRAQTTPDHILYTLLNCRGAIANSLTCVQLHKRAEKIAVMLMERGHLQDGDHVALVYPPGIDLIAAFYGCLYAGCVPITVRPPHPQNIATTLPTVKMIVEVSRSACLMTTQLICKLLRSREAAAAVDVRTWPLILDTDDLPKKRPAQICKPCNPDTLAYLDFSVSTTGMLAGVKMSHAATSAFCRSIKLQCELYPSREVAICLDPYCGLGFVLWCLCSVYSGHQSILIPPSELETNPALWLLAVSQYKVRDTFCSYSVMELCTKGLGSQTESLKARGLDLSRVRTCVVVAEERPRIALTQSFSKLFKDLGLHPRAVSTSFGCRVNLAICLQGTSGPDPTTVYVDMRALRHDRVRLVERGSPHSLPLMESGKILPGVRIIIANPETKGPLGDSHLGEIWVHSAHNASGYFTIYGDESLQSDHFNSRLSFGDTQTIWARTGYLGFLRRTELTDANGERHDALYVVGALDEAMELRGMRYHPIDIETSVIRAHKSVTECAVFTWTNLLVVVVELDGSEQEALDLVPLVTNVVLEEHYLIVGVVVVVDIGVIPINSRGEKQRMHLRDGFLADQLDPIYVAYNM

SEQ ID NO: 491 - protein, 1548 aa, Homo sapien
MALPLEVRARLAELELELSEGDITQKGYEKKRSKLIGAYLPQPPRVDQALPQERRAPVTPSSASRYHRRRSSGSRDERYRSDVHTEAVQAALAKHKERKMAVPMPSKRRSLVVQTSMDAYTPPDTSSGSEDEGSVQGDSQGTPTSSQGSINMEHWISQAIHGSTTSTTSSSSTQSGGSGAAHRLADVMAQTHIENHSAPPDVTTYTSEHSIQVERPQGSTGSRTAPKYGNAELMETGDGVPVSSRVSAKIQQLVNTLKRPKRPPLREFFVDDFEELLEVQQPDPNQPKPEGAQMLAMRGEQLGVVTNWPPSLEAALQRWGTISPKAPCLTTMDTNGKPLYILTYGKLWTRSMKVAYSILHKLGTKQEPMVRPGDRVALVFPNNDPAAFMAAFYGCLLAEVVPVPIEVPLTRKDAGSQQIGFLLGSCGVTVALTSDACHKGLPKSPTGEIPQFKGWPKLLWFVTESKHLSKPPRDWFPHIKDANNDTAYIEYKTCKDGSVLGVTVTRTALLTHCQALTQACGYTEAETIVNVLDFKKDVGLWHGILTSVMNMMHVISIPYSLMKVNPLSWIQKVCQYKAKVACVKSRDMHWALVAHRDQRDINLSSLRMLIVADGANPWSISSCDAFLNVFQSKGLRQEVICPCASSPEALTVAIRRPTDDSNQPPGRGVLSMHGLTYGVIRVDSEEKLSVLTVQDVGLVMPGAIMCSVKPDGVPQLCRTDEIGELCVCAVATGTSYYGLSGMTKNTFEVFPMTSSGAPISEYPFIRTGLLGFVGPGGLVFVVGKMDGLMVVSGRRHNADDIVATALAVEPMKFVYRGRIAVFSVTVLHDERIVIVAEQRPDSTEEDSFQWMSRVLQAIDSIHQVGVYCLALVPANTLPKTPLGGIHLSETKQLFLEGSLHPCNVLMCPHTCVTNLPKPRQKQPEIGPASVMVGNLVSGKRIAQASGRDLGQIEDNDQARKFLFLSEVLQWRAQTTPDHILYTLLNCRGAIANSLTCVQLHKRAEKIAVMLMERGHLQDGDHVALVYPPGIDLIAAFYGCLYAGCVPITVRPPHPQNIATTLPTVKMIVEVSRSACLMTTQLICKLLRSREAAAAVDVRTWPLILDTDDLPKKRPAQICKPCNPDTLAYLDFSVSTTGMLAGVKMSHAATSAFCRSIKLQCELYPSREVAICLDPYCGLGFVLWCLCSVYSGHQSILIPPSELETNPALWLLAVSQYKVRDTFCSYSVMELCTKGLGSQTESLKARGLDLSRVRTCVVVAEERPRIALTQSFSKLFKDLGLHPRAVSTSFGCRVNLAICLQGTSGPDPTTVYVDMRALRHDRVRLVERGSPHSLPLMESGKILPGVRIIIANPETKGPLGDSHLGEIWVHSAHNASGYFTIYGDESLQSDHFNSRLSFGDTQTIWARTGYLGFLRRTELTDANGERHDALYVVGALDEAMELRGMRYHPIDIETSVIRAHKSVTECAVFTWTNLLVVVVELDGSEQEALDLVPLVTNVVLEEHYLIVGVVVVVDIGVIPINSRGEKQRMHLRDGFLADQLDPIYVAYNM

SEQ ID NO: 492 - protein, 1420 aa, Homo sapien
MRGEQLGVVTNWPPSLEAALQRWGTISPKAPCLTTMDTNGKPLYILTYGKLWTRSMKVAYSILHKLGTKQEPMVRPGDRVALVFPNNDPAAFMAAFYGCLLAEVVPVPIEVPLTRKDAGSQQIGFLLGSCGVTVALTSDACHKGLPKSPTGEIPQFKGWPKLLWFVTESKHLSKPPRDWFPHIKDANNDTAYIEYKTCKDGSVLGVTVTRTALLTHCQALTQACGYTEAETIVNVLDFKKDVGLWHGILTSVMNMMHVISIPYSLMKVNPLSWIQKVCQYKAKVACVKSRDMHWALVAHRDQRDINLSSLRMLIVADGANPWSISSCDAFLNVFQSKGLRQEVICPCASSPEALTVAIRRPTDDSNQPPGRGVLSMHGLTYGVIRVDSEEKLSVLTVQDVGLVMPGAIMCSVKPDGVPQLCRTDEIGELCVCAVATGTSYYGLSGMTKNTFEVFPMTSSGAPISEYPFIRTGLLGFVGPGGLVFVVGKMDGLMVVSGRRHNADDIVATALAVEPMKFVYRGRIAVFSVTVLHDERIVIVAEQRPDSTEEDSFQWMSRVLQVALPRPGHWSPVSCFWPPYFIQIMVGPAVALPMGWPFFPSLHLIRNYIKCPETSSADRGCRDQEFAQLVPTGHLGEVEVSFLFDLENMYLFSKVPFLLCMVFHKPWVTLFSFGEFSRKILSLTLAFLCWEQCLYCTDFCVLWIIFCIIEIRTVYTSSYNMISSLLTFQAIDSIHQVGVYCLALVPANTLPKTPLGGIHLSETKQLFLEGSLHPCNVLMCPHTCVTNLPKPRQKQPEIGPASVMVGNLVSGKRIAQASGRDLGQIEDNDQARKFLFLSEVLQWRAQTTPDHILYTLLNCRGAIANSLTCVQLHKRAEKIAVMLMERGHLQDGDHVALVYPPGIDLIAAFYGCLYAGCVPITVRPPHPQNIATTLPTVKMIVEVSRSACLMTTQLICKLLRSREAAAAVDVRTWPLILDTDDLPKKRPAQICKPCNPDTLAYLDFSVSTTGMLAGVKMSHAATSAFCRSIKLQCELYPSREVAICLDPYCGLGFVLWCLCSVYSGHQSILIPPSELETNPALWLLAVSQYKVRDTFCSYSVMELCTKGLGSQTESLKARGLDLSRVRTCVVVAEERPRIALTQSFSKLFKDLGLHPRAVSTSFGCRVNLAICLQGTSGPDPTTVYVDMRALRHDRVRLVERGSPHSLPLMESGKILPGVRIIIANPETKGPLGDSHLGEIWVHSAHNASGYFTIYGDESLQSDHFNSRLSFGDTQTIWARTGYLGFLRRTELTDANGERHDALYVVGALDEAMELRGMRYHPIDIETSVIRAHKSVTECAVFTWTNLLVVVVELDGSEQEALDLVPLVTNVVLEEHYLIVGVVVVVDIGVIPINSRGEKQRMHLRDGFLADQLDPIYVAYNM

SEQ ID NO: 493 - protein, 1315 aa, Homo sapien
MTPKMLVVPRKDAGSQQIGFLLGSCGVTVALTSDACHKGLPKSPTGEIPQFKGWPKLLWFVTESKHLSKPPRDWFPHIKDANNDTAYIEYKTCKDGSVLGVTVTRTALLTHCQALTQACGYTEAETIVNVLDFKKDVGLWHGILTSVMNMMHVISIPYSLMKVNPLSWIQKVCQYKAKVACVKSRDMHWALVAHRDQRDINLSSLRMLIVADGANPWSISSCDAFLNVFQSKGLRQEVICPCASSPEALTVAIRRPTDDSNQPPGRGVLSMHGLTYGVIRVDSEEKLSVLTVQDVGLVMPGAIMCSVKPDGVPQLCRTDEIGELCVCAVATGTSYYGLSGMTKNTFEVFPMTSSGAPISEYPFIRTGLLGFVGPGGLVFVVGKMDGLMVVSGRRHNADDIVATALAVEPMKFVYRGRIAVFSVTVLHDERIVIVAEQRPDSTEEDSFQWMSRVLQVALPRPGHWSPVSCFWPPYFIQIMVCPAVALPMGWPFFPSLHLIRNYIKCPETSSADRGCRDQEFAQLVPTGHLGEVEVSFLFDLENMYLFSKVPFLLCMVFHKPWVTLFSFGEFSRKILSLTLAFLCWEQCLYCTDFCVLWIIFCIIYIRTVYTSSYNMISSLLTFQAIDSIHQVGVYCLALVPANTLPKTPLGGIHLSETKQLFLEGSLHPCNVLMCPHTCVTNLPKPRQKQPEIGPASVMVGNLVSGKRIAQASGRDLGQIEDNDQARKFLFLSEVLQWRAQTTPDHILYTLLNCRGAIANSLTCVQLHKRAEKIAVMLMERGHLQDGDHVALVYPPGIDLIAAFYGCLYAGCVPITVRPPHPQNIATTLPTVKMIVEVSRSACLMTTQLICKLLRSREAAAAVDVRTWPLILDTDDLPKKRPAQICKPCNPDTLAYLDFSVSTTGMLAGVKMSHAATSAFCRSIKLQCELYPSREVAICLDPYCGLGFVLWCLCSVYSGHQSILIPPSELETNPALWLLAVSQYKVRDTFCSYSVMELCTKGLGSQTESLKARGLDLSRVRTCVVVAEERPRIALTQSFSKLFKDLGLHPRAVSTSFGCRVNLAICLQGTSGPDPTTVYVDMRALRHDRVRLVERGSPHSLPLMESGKILPGVRIIIANPETKGPLGDSHLGEIWVHSAHNASGYFTIYGDESLQSDHFNSRLSFGDTQTIWARTGYLGFLRRTELTDANGERHDALYVVGALDEAMELRGMRYHPIDIETSVIRAHKSVTECAVFTWTNLLVVVVELDGSEQEALDLVPLVTNVVLEEHYLIVGVVVVVDIGVIPINSRGEKQRMHLRDGFLADQLDPIYVAYNM

SEQ ID NO: 494 - protein, 1166 aa, Homo sapien
MMHVISIPYSLMKVNPLSWIQKVCQYKAKVACVKSRDMHWALVAHRDQRDINLSSLRMLIVADGANPWSISSCDAFLNVFQSKGLRQEVICPCASSPEALTVAIRRPTDDSNQPPGRGVLSMHGLTYGVIRVDSEEKLSVLTVQDVGLVMPGAIMCSVKPDGVPQLCRTDEIGELCVCAVATGTSYYGLSGMTKNTFEVFPMTSSGAPISEYPFIRTGLLGFVGPGGLVFVVGKMDGLMVVSGRRHNADDIVATALAVEPMKFVYRGRIAVFSVTVLHDERIVIVAEQRPDSTEEDSFQWMSRVLQVALPRPGHWSPVSCFWPPYFIQIMVCPAVALPMGWPFFPSLHLIRNYIKCPETSSADRGCRDQEFAQLVPTGHLGEVEVSFLFDLENMYLFSKVPFLLCMVFHKPWVTLFSFGEFSRKILSLTLAFLCWEQCLYCTDFCVLWIIFCIIEIRTVYTSSYNMISSLLTFQAIDSIHQVGVYCLALVPANTLPKTPLGGIHLSETKQLFLEGSLHPCNVLMCPHTCVTNLPKPRQKQPEIGPASVMVGNLVSGKRIAQASGRDLGQIEDNDQARKFLFLSEVLQWRAQTTPDHILYTLLNCRGAIANSLTCVQLHKRAEKIAVMLMERGHLQDGDHVALVYPPGIDLIAAFYGCLYAGCVPITVRPPHPQNIATTLPTVKMIVEVSRSACLMTTQLICKLLRSREAAAAVDVRTWPLILDTDDLPKKRPAQICKPCNPDTLAYLDFSVSTTGMLAGVKMSHAATSAFCRSIKLQCELYPSREVAICLDPYCGLGFVLWCLCSVYSGHQSILIPPSELETNPALWLLAVSQYKVRDTFCSYSVMELCTKGLGSQTESLKARGLDLSRVRTCVVVAEERPRIALTQSFSKLFKDLGLHPRAVSTSFGCRVNLAICLQGTSGPDPTTVYVDMRALRHDRVRLVERGSPHSLPLMESGKILPGVRIIIANPETKGPLGDSHLGEIWVHSAHNASGYFTIYGDESLQSDHFNSRLSFGDTQTIWARTGYLGFLRRTELTDANGERHDALYVVGALDEAMELRGMRYHPIDIETSVIRAHKSVTECAVFTWTNLLVVVVELDGSEQEALDLVPLVTNVVLEEHYLIVGVVVVVDIGVIPINSRGEKQRMHLRDGFLADQLDPIYVAYNM

SEQ ID NO: 495 - protein, 586 aa, Homo sapien
MTRARSLQAALLKESYVLVPVIGPQGAIANSLTCVQLHKRAEKIAVMLMERGHLQDGDHVALVYPPGIDLIAAFYGCLYAGCVPITVRPPHPQNIATTLPTVKMIVEVSRSACLMTTQLICKLLRSREAAAAVDVRTWPLILDTDDLPKKRPAQICKPCNPDTLAYLDFSVSTTGMLAGVKMSHAATSAFCRSIKLQCELYPSREVAICLDPYCGLGFVLWCLCSVYSGHQSILIPPSELETNPALWLLAVSQYKVRDTFCSYSVMELCTKGLGSQTESLKARGLDLSRVRTCVVVAEERPRIALTQSFSKLFKDLGLHPRAVSTSFGCRVNLAICLQGTSGPDPTTVYVDMRALRHDRVRLVERGSPHSLPLMESGKILPGVRIIIANPETKGPLGDSHLGEIWVHSAHNASGYFTIYGDESLQSDHFNSRLSFGDTQTIWARTGYLGFLRRTELTDANGERHDALYVVGALDEAMELRGMRYHPIDIETSVIRAHKSVTECAVFTWTNLLVVVVELDGSEQEALDLVPLVTNVVLEEHYLIVGVVVVVDIGVIPINSRGEKQRMHLRDGFLADQLDPIYVAYNM

SEQ ID NO: 496 - protein, 1793 aa, Homo sapien
MALPLEVRARLAELELELSEGDITQKGYEKKRSKLIGAYLPQPPTANGAAVVRCRLQHSEGAPRRTFRSAHIGVCDVREAAARERVASTAGNRPLFYFRFGVDQALPQERRAPVTPSSASRYHRRRSSGSRDERYRSDVHTEAVQAALAKHKERKMAVPMPSKRRSLVVQTSMDAYTPPDTSSGSEDEGSVQGDSQGTPTSSQGSINMEHWISQAIHGSTTSTTSSSSTQSGGSGAAHRLADVMAQTHIENHSAPPDVTTYTSEHSIQVERPQGSTGSRTAPKYGNAELMETGDGVPVSSRVSAKIQQLVNTLKRPKRPPLREFFVDDFEELLEVQQPDPNQPKPEGAQMLAMRGEQLGVVTNWPPSLEAALQRWGTISPKAPCLTTMDTNGKPLYILTYGKLWTRSMKVAYSILHKLGTKQEPMVRPGDRVALVFPNNDPAAFMAAFYGCLLAEVVPVPIEVPLTRKDAGSQQIGFLLGSCGVTVALTSDACHKGLPKSPTGEIPQFKGWPKLLWFVTESKHLSKPPRDWFPHIKDANNDTAYIEYKTCKDGSVLGVTVTRTALLTHCQALTQACGYTEAETIVNVLDFKKDVGLWHGILTSVMNMMHVISIPYSLMKVNPLSWIQKVCQYKAKVACVKSRDMHWALVAHRDQRDINLSSLRMLIVADGANPWSISSCDAFLNVFQSKGLRQEVICPCASSPEALTVAIRRPTDDSNQPPGRGVLSMHGLTYGVIRVDSEEKLSVLTVQDVGLVMPGAIMCSVKPDGVPQLCRTDEIGELCVCAVATGTSYYGLSGMTKNTFEVFPMTSSGAPISEYPFIRTGLLGFVGPGGLVFVVGKMDGLMVVSGRRHNADDIVATALAVEPMKFVYRGRIAVFSVTVLHDERIVIVAEQRPDSTEEDSFQWMSRVLQVALPRPGHWSPVSCFWPPYFIQIMVCPAVALPMGWPFFPSLHLIRNYIKCPETSSADRGCRDQEFAQLVPTGHLGEVEVSFLFDLENMYLFSKVPFLLCMVFHKPWVTLFSFGEFSRKILSLTLAFLCWEQCLYCTDFCVLWIIFCIILIRTVYTSSYNMISSLLTFQAIDSIHQVGVYCLALVPANTLPKTPLGGIHLSETKQLFLEGSLHPCNVLMCPHTCVTNLPKPRQKQPEIGPASVMVGNLVSGKRIAQASGRDLGQIEDNDQARKFLFLSEVLQWRAQTTPDHILYTLLNCRGAIANSLTCVQLHKRAEKIAVMLMERGHLQDGDHVALVYPPGIDLIAAFYGCLYAGCVPITVRPPHPQNIATTLPTVKMIVEVSRSACLMTTQLICKLLRSREAAAAVDVRTWPLILDTDDLPKKRPAQICKPCNPDTLAYLDFSVSTTGMLAGVKMSHAATSAFCRSIKLQCELYPSREVAICLDPYCGLGFVLWCLCSVYSGHQSILIPPSELETNPALWLLAVSQYKVRDTFCSYSVMELCTKGLGSQTESLKARGLDLSRVRTCVVVAEERPRIALTQSFSKLFKDLGLHPRAVSTSFGCRVNLAICLQGTSGPDPTTVYVDMRALRHDRVRLVERGSPHSLPLMESGKILPGVRIIIANPETKGPLGDSHLGEIWVHSAHNASGYFTIYGDESLQSDHFNSRLSFGDTQTIWARTGYLGFLRRTELTDANGEKKERLERHYGEAYAGCHYSTERHDALYVVGALDEAMELRGMRYHPIDIETSVIRAHKSVTECAVFTWTNLLVVVVELDGSEQEALDLVPLVTNVVLEEHYLIVGVVVVVDIGVIPINSRGEKQRMHLRDGFLADQLDPIYVAYNM

SEQ ID NO: 497 - protein, 1782 aa, Homo sapien
MALPLEVRARLAELELELSEGDITQKGYEKKRSKLIGAYLPQPPTANGAAVVRCRLQHSEGAPRRTFRSAHIGVCDVREAAARERVASTAGNRPLFYFRFGVDQALPQERRAPVTPSSASRYHRRRSSGSRDERYRSDVHTEAVQAALAKHKERKMAVPMPSKRRSLVVQTSMDAYTPPDTSSGSEDEGSVQGDSQGTPTSSQGSINMEHWISQAIHGSTTSTTSSSSTQSGGSGAAHRLADVMAQTHIENHSAPPDVTTYTSEHSIQVERPQGSTGSRTAPKYGNAELMETGDGVPVSSRVSAKIQQLVNTLKRPKRPPLREFFVDDFEELLEVQQPDPNQPKPEGAQMLAMRGEQLGVVTNWPPSLEAALQRWGTISPKAPCLTTMDTNGKPLYILTYGKLWTRSMKVAYSILHKLGTKQEPMVRPGDRVALVFPNNDPAAFMAAFYGCLLAEVVPVPIEVPLTRKDAGSQQIGFLLGSCGVTVALTSDACHKGLPKSPTGEIPQFKGWPKLLWFVTESKHLSKPPRDWFPHIKDANNDTAYIEYKTCKDGSVLGVTVTRTALLTHCQALTQACGYTEAETIVNVLDFKKDVGLWHGILTSVMNMMHVISIPYSLMKVNPLSWIQKVCQYKAKVACVKSRDMHWALVAHRDQRDINLSSLRMLIVADGANPWSISSCDAFLNVFQSKGLRQEVICPCASSPEALTVAIRRPTDDSNQPPGRGVLSMHGLTYGVIRVDSEEKLSVLTVQDVGLVMPGAIMCSVKPDGVPQLCRTDEIGELCVCAVATGTSYYGLSGMTKNTFEVFPMTSSGAPISEYPFIRTGLLGFVGPGGLVFVVGKMDGLMVVSGRRHNADDIVATALAVEPMKFVYRGRIAVFSVTVLHDERIVIVAEQRPDSTEEDSFQWMSRVLQVALPRPGHWSPVSCFWPPYFIQIMVCPAVALPMGWPFFPSLHLIRNYIKCPETSSADRGCRDQEFAQLVPTGHLGEVEVSFLFDLENMYLFSKVPFLLCMVFHKPWVTLFSFGEFSRKILSLTLAFLCWEQCLYCTDFCVLWIIFCIILIRTVYTSSYNMISSLLTFQAIDSIHQVGVYCLALVPANTLPKTPLGGIHLSETKQLFLEGSLHPCNVLMCPHTCVTNLPKPRQKQPEIGPASVMVGNLVSGKRIAQASGRDLGQIEDNDQARKFLFLSEVLQWRAQTTPDHILYTLLNCRGAIANSLTCVQLHKRAEKIAVMLMERGHLQDGDHVALVYPPGIDLIAAFYGCLYAGCVPITVRPPHPQNIATTLPTVKMIVEVSRSACLMTTQLICKLLRSREAAAAVDVRTWPLILDTDDLPKKRPAQICKPCNPDTLAYLDFSVSTTGMLAGVKMSHAATSAFCRSIKLQCELYPSREVAICLDPYCGLGFVLWCLCSVYSGHQSILIPPSELETNPALWLLAVSQYKVRDTFCSYSVMELCTKGLGSQTESLKARGLDLSRVRTCVVVAEERPRIALTQSFSKLFKDLGLHPRAVSTSFGCRVNLAICLQPHRLWTLAEQGTSGPDPTTVYVDMRALRHDRVRLVERGSPHSLPLMESGKILPGVRIIIANPETKGPLGDSHLGEIWVHSAHNASGYFTIYGDESLQSDHFNSRLSFGDTQTIWARTGYLGFLRRTELTDANGERHDALYVVGALDEAMELRGMRYHPIDIETSVIRAHKSVTECAVFTWTNLLVVVVELDGSEQEALDLVPLVTNVVLEEHYLIVGVVVVVDIGVIPINSRGEKQRMHLRDGFLADQLDPIYVAYNM

SEQ ID NO: 498 - protein, 1689 aa, Homo sapien
MALPLEVRARLAELELELSEGDITQKGYEKKRSKLIGAYLPQPPTANGAAVVRCRLQHSEGAPRRTFRSAHIGVCDVREAAARERVASTAGNRPLFYFRFGVDQALPQERRAPVTPSSASRYHRRRSSGSRDERYRSDVHTEAVQAALAKHKERKMAVPMPSKRRSLVVQTSMDAYTPPDTSSGSEDEGSVQGDSQGTPTSSQGSINMEHWISQAIHGSTTSTTSSSSTQSGGSGAAHRLADVMAQTHIENHSAPPDVTTYTSEHSIQVERPQGSTGSRTAPKYGNAELMETGDGVPVSSRVSAKIQQLVNTLKRPKRPPLREFFVDDFEELLEVQQPDPNQPKPEGAQMLAMRGEQLGVVTNWPPSLEAALQRWGTISPKAPCLTTMDTNGKPLYILTYGKLWTRSMKVAYSILHKLGTKQEPMVRPGDRVALVFPNNDPAAFMAAFYGCLLAEVVPVPIEVPLTRKDAGSQQIGFLLGSCGVTVALTSDACHKGLPKSPTGEIPQFKGWPKLLWFVTESKHLSKPPRDWFPHIKDANNDTAYIEYKTCKDGSVLGVTVTRTALLTHCQALTQACGYTEAETIVNVLDFKKDVGLWHGILTSVMNMMHVISIPYSLMKVNPLSWIQKVCQYKAKVACVKSRDMHWALVAHRDQRDINLSSLRMLIVADGANPWSISSCDAFLNVFQSKGLRQEVICPCASSPEALTVAIRRPTDDSNQPPGRGVLSMHGLTYGVIRVDSEEKLSVLTVQDVGLVMPGAIMCSVKPDGVPQLCRTDEIGELCVCAVATGTSYYGLSGMTKNTFEVFPMTSSGAPISEYPFIRTGLLGFVGPGGLVFVVGKMDGLMVVSGRRHNADDIVATALAVEPMKFVYRGRIAVFSVTVLHDERIVIVAEQRPDSTEEDSFQWMSRVLQVALPRPGHWSPVSCFWPPYFIQIMVCPAVALPMGWPFFPSLHLIRNYIKCPETSSADRGCRDQEFAQLVPTGHLGEVEVSFLFDLENMYLFSKVPFLLCMVFHKPWVTLFSFGEFSRKILSLTLAFLCWEQCLYCTDFCVLWIIFCIILIRTVYTSSYNMISSLLTFQAIDSIHQVGVYCLALVPANTLPKTPLGGIHLSETKQLFLEGSLHPCNVLMCPHTCVTNLPKPRQKQPEIGPASVMVGNLVSGKRIAQASGRDLGQIEDNDQARKFLFLSEVLQWRAQTTPDHILYTLLNCRGAIANSLTCVQLHKRAEKIAVMLMERGHLQDGDHVALVYPPGIDLIAAFYGCLYAGCVPITVRPPHPQNIATTLPTVKMIVEVSRSACLMTTQLICKLLRSREAAAAVDVRTWPLILDTDDLPKKRPAQICKPCNPDTLAYLDFSVSTTGMLAGVKMSHAATSAFCRSIKLQCELYPSREVAICLDPYCGLGFVLWCLCSVYSGHQSILIPPSELETNPALWLLAVSQYKVRDTFCSYSVMELCTKGLGSQTESLKARGLDLSRVRTCVVVAEERPRIALTQSFSKLFKDLGLHPRAVSTSFGCRVNLAICLQGTSGPDPTTVYVDMRALRHDRVRLVERGSPHSLPLMESGKILPGVRIIIANPETKGPLGDSHLGEIWVHSAHNASGYFTIYGDESLQSDHFNSRLSFGDTQTIWARTGYLGFLRRTELTDANGERHDALYVVGALDEAMELRGMRYHPIDIETSVIRAHKSVTEC

SEQ ID NO: 499 - protein, 937 aa, Homo sapien
MALPLEVRARLAELELELSEGDITQKGYEKKRSKLIGAYLPQPPTANGAAVVRCRLQHSEGAPRRTFRSAHIGVCDVREAAARERVASTAGNRPLFYFRFGVDQALPQERRAPVTPSSASRYHRRRSSGSRDERYRSDVHTEAVQAALAKHKERKMAVPMPSKRRSLVVQTSMDAYTPPDTSSGSEDEGSVQGDSQGTPTSSQGSINMEHWISQAIHGSTTSTTSSSSTQSGGSGAAHRLADVMAQTHIENHSAPPDVTTYTSEHSIQVERPQGSTGSRTAPKYGNAELMETGDGVPVSSRVSAKIQQLVNTLKRPKRPPLREFFVDDFEELLEVQQPDPNQPKPEGAQMLAMRGEQLGVVTNWPPSLEAALQRWGTISPKAPCLTTMDTNGKPLYILTYGKLWTRSMKVAYSILHKLGTKQEPMVRPGDRVALVFPNNDPAAFMAAFYGCLLAEVVPVPIEVPLTRKDAGSQQIGFLLGSCGVTVALTSDACHKGLPKSPTGEIPQFKGWPKLLWFVTESKHLSKPPRDWFPHIKDANNDTAYIEYKTCKDGSVLGVTVTRTALLTHCQALTQACGYTEAETIVNVLDFKKDVGLWHGILTSVMNMMHVISIPYSLMKVNPLSWIQKVCQYKAKVACVKSRDMHWALVAHRDQRDINLSSLRMLIVADGANPWSISSCDAFLNVFQSKGLRQEVICPCASSPEALTVAIRRPTDDSNQPPGRGVLSMHGLTYGVIRVDSEEKLSVLTVQDVGLVMPGAIMCSVKPDGVPQLCRTDEIGELCVCAVATGTSYYGLSGMTKNTFEVFPMTSSGAPISEYPFIRTGLLGFVGPGGLVFVVGKMDGLMVVSGRRHNADDIVATALAVEPMKFVYRGRIAVFSVTVLHDERIVIVAEQRPDSTEEDSFQWMSRVLQVALPRPGHWSPVSCFWPPYFIQIMV

SEQ ID NO: 500 - protein, 70 aa, Homo sapien
RVSPRNVLSSSKSETKQLFLEGSLHPCNVLMCPHTCVTNLPKPRQKQPGMCTTWAACEVREFPWGCTALG

SEQ ID NO: 501 - protein, 1772 aa, Homo sapien
MALPLEVRARLAELELELSEGDITQKGYEKKRSKLIGAYLPQPPTANGAAVVRCRLQHSEGAPRRTFRSAHIGVCDVREAAARERVASTAGNRPLFYFRFGVDQALPQERRAPVTPSSASRYHRRRSSGSRDERYRSDVHTEAVQAALAKHKERKMAVPMPSKRRSLVVQTSMDAYTPPDTSSGSEDEGSVQGDSQGTPTSSQGSINMEHWISQAIHGSTTSTTSSSSTQSGGSGAAHRLADVMAQTHIENHSAPPDVTTYTSEHSIQVERPQGSTGSRTAPKYGNAELMETGDGVPVSSRVSAKIQQLVNTLKRPKRPPLREFFVDDFEELLEVQQPDPNQPKPEGAQMLAMRGEQLGVVTNWPPSLEAALQRWGTISPKAPCLTTMDTNGKPLYILTYGKLWTRSMKVAYSILHKLGTKQEPMVRPGDRVALVFPNNDPAAFMAAFYGCLLAEVVPVPIEVPLTRKDAGSQQIGFLLGSCGVTVALTSDACHKGLPKSPTGEIPQFKGWPKLLWFVTESKHLSKPPRDWFPHIKDANNDTAYIEYKTCKDGSVLGVTVTRTALLTHCQALTQACGYTEAETIVNVLDFKKDVGLWHGILTSVMNMMHVISIPYSLMKVNPLSWIQKVCQYKAKVACVKSRDMHWALVAHRDQRDINLSSLRMLIVADGANPWSISSCDAFLNVFQSKGLRQEVICPCASSPEALTVAIRRPTDDSNQPPGRGVLSMHGLTYGVIRVDSEEKLSVLTVQDVGLVMPGAIMCSVKPDGVPQLCRTDEIGELCVCAVATGTSYYGLSGMTKNTFEVFPMTSSGAPISEYPFIRTGLLGFVGPGGLVFVVGKMDGLMVVSGRRHNADDIVATALAVEPMKFVYRGRIAVFSVTVLHDERIVIVAEQRPDSTEEDSFQWMSRVLQVALPRPGHWSPVSCFWPPYFIQIMVCPAVALPMGWPFFPSLHLIRNYIKCPETSSADRGCRDQEFAQLVPTGHLGEVEVSFLFDLENMYLFSKVPFLLCMVFHKPWVTLFSFGEFSRKILSLTLAFLCWEQCLYCTDFCVLWIIFCIILIRTVYTSSYNMISSLLTFQAIDSIHQVGVYCLALVPANTLPKTPLGGIHLSETKQLFLEGSLHPCNVLMCPHTCVTNLPKPRQKQPEIGPASVMVGNLVSGKRIAQASGRDLGQIEDNDQARKFLFLSEVLQWRAQTTPDHILYTLLNCRGAIANSLTCVQLHKRAEKIAVMLMERGHLQDGDHVALVYPPGIDLIAAFYGCLYAGCVPITVRPPHPQNIATTLPTVKMIVEVSRSACLMTTQLICKLLRSREAAAAVDVRTWPLILDTDDLPKKRPAQICKPCNPDTLAYLDFSVSTTGMLAGVKMSHAATSAFCRSIKLQCELYPSREVAICLDPYCGLGFVLWCLCSVYSGHQSILIPPSELETNPALWLLAVSQYKVRDTFCSYSVMELCTKGLGSQTESLKARGLDLSRVRTCVVVAEERPRIALTQSFSKLFKDLGLHPRAVSTSFGCRVNLAICLQGTSGPDPTTVYVDMRALRHDRVRLVERGSPHSLPLMESGKILPGVRIIIANPETKGPLGDSHLGEIWVHSAHNASGYFTIYGDESLQSDHFNSRLSFGDTQTIWARTGYLGFLRRTELTDANGERHDALYVVGALDEAMELRGMRYHPIDIETSVIRAHKSVTECAVFTWTNLLVVVVELDGSEQEALDLVPLVTNVVLEEHYLIVGVVVVVDIGVIPINSRGEKQRMHLRDGFLADQLDPIYVAYNM

SEQ ID NO: 502 - protein, 120 aa, Homo sapien
MFVRCVRADTSSPGAWSPSSPLCPGTFWPPQPSRPQVPGSVNVRALKQLVPKAIKYPLNCKAPGFCFCQLGRLNPLVPVLLKDDSIPDKTFLSESSIFQKTFPCTWVSHGCMAASPCSVL

SEQ ID NO: 503 - protein, 1689 aa, Homo sapien
MALPLEVRARLAELELELSEGDITQKGYEKKRSKLIGAYLPQPPTANGAAVVRCRLQHSEGAPRRTFRSAHIGVCDVREAAARERVASTAGNRPLFYFRFGVDQALPQERRAPVTPSSASRYHRRRSSGSRDERYRSDVHTEAVQAALAKHKERKMAVPMPSKRRSLVVQTSMDAYTPPDTSSGSEDEGSVQGDSQGTPTSSQGSINMEHWISQAIHGSTTSTTSSSSTQSGGSGAAHRLADVMAQTHIENHSAPPDVTTYTSEHSIQVERPQGSTGSRTAPKYGNAELMETGDGVPVSSRVSAKIQQLVNTLKRPKRPPLREFFVDDFEELLEVQQPDPNQPKPEGAQMLAMRGEQLGVVTNWPPSLEAALQRWGTISPKAPCLTTMDTNGKPLYILTYGKLWTRSMKVAYSILHKLGTKQEPMVRPGDRVALVFPNNDPAAFMAAFYGCLLAEVVPVPIEVPLTRKDAGSQQIGFLLGSCGVTVALTSDACHKGLPKSPTGEIPQFKGWPKLLWFVTESKHLSKPPRDWFPHIKDANNDTAYIEYKTCKDGSVLGVTVTRTALLTHCQALTQACGYTEAETIVNVLDFKKDVGLWHGILTSVMNMMHVISIPYSLMKVNPLSWIQKVCQYKAKVACVKSRDMHWALVAHRDQRDINLSSLRMLIVADGANPWSISSCDAFLNVFQSKGLRQEVICPCASSPEALTVAIRRPTDDSNQPPGRGVLSMHGLTYGVIRVDSEEKLSVLTVQDVGLVMPGAIMCSVKPDGVPQLCRTDEIGELCVCAVATGTSYYGLSGMTKNTFEVFPMTSSGAPISEYPFIRTGLLGFVGPGGLVFVVGKMDGLMVVSGRRHNADDIVATALAVEPMKFVYRGRIAVFSVTVLHDERIVIVAEQRPDSTEEDSFQWMSRVLQVALPRPGHWSPVSCFWPPYFIQIMVCPAVALPMGWPFFPSLHLIRNYIKCPETSSADRGCRDQEFAQLVPTGHLGEVEVSFLFDLENMYLFSKVPFLLCMVFHKPWVTLFSFGEFSRKILSLTLAFLCWEQCLYCTDFCVLWIIFCIILIRTVYTSSYNMISSLLTFQAIDSIHQVGVYCLALVPANTLPKTPLGGIHLSETKQLFLEGSLHPCNVLMCPHTCVTNLPKPRQKQPEIGPASVMVGNLVSGKRIAQASGRDLGQIEDNDQARKFLFLSEVLQWRAQTTPDHILYTLLNCRGAIANSLTCVQLHKRAEKIAVMLMERGHLQDGDHVALVYPPGIDLIAAFYGCLYAGCVPITVRPPHPQNIATTLPTVKMIVEVSRSACLMTTQLICKLLRSREAAAAVDVRTWPLILDTDDLPKKRPAQICKPCNPDTLAYLDFSVSTTGMLAGVKMSHAATSAFCRSIKLQCELYPSREVAICLDPYCGLGFVLWCLCSVYSGHQSILIPPSELETNPALWLLAVSQYKVRDTFCSYSVMELCTKGLGSQTESLKARGLDLSRVRTCVVVAEERPRIALTQSFSKLFKDLGLHPRAVSTSFGCRVNLAICLQGTSGPDPTTVYVDMRALRHDRVRLVERGSPHSLPLMESGKILPGVRIIIANPETKGPLGDSHLGEIWVHSAHNASGYFTIYGDESLQSDHFNSRLSFGDTQTIWARTGYLGFLRRTELTDANGERHDALYVVGALDEAMELRGMRYHPIDIETSVIRAHKSVTEW

SEQ ID NO: 504 - protein, 146 aa, Homo sapien [sequence omitted]

SEQ ID NO: 505 - protein, 57 aa, Homo sapien
MNYFSIKFINIYFGKLLKMSFSKLIMLKMYGIKFNFMRLSDIFTKKNLELRLNLEDI

SEQ ID NO: 506 - protein, 45 aa, Homo sapien
MQIWRIITIRSQKDPGQGNTRVSIYAYVFGRQKGFQGRLILRYKI

SEQ ID NO: 507 - protein, 89 aa, Homo sapien
MKIIQKHFCCLIGLLIGKTLLLNSRSLLPCNYHPWIQDLLWESYNLNFAPFHYEALRQVAWSNPPENQGPIHSFWYTHAWHDGWSMVEA

SEQ ID NO: 508 - protein, 81 aa, Homo sapien
MAGVSQTAPPSRSLVGWHGGGAAERQPLESLITSASVLYALYLWTSLWTAKKYSLSIDLKRFLSESTVLPHSIKLKLLKSE

SEQ ID NO: 509 - protein, 55 aa, Homo sapien
MESRGGVGSNLLPPALLRFLIPGFVLSKSTVEAAAFPPPFQKPSEDVGEKPPWNV

SEQ ID NO: 510 - protein, 54 aa, Homo sapien
MRLSFFCVVDCTLDFFPKSLFISYFLYGFRKCSLRNCSLTFSSVNGMLIGEKKD

SEQ ID NO: 511 - protein, 25 aa, Homo sapien
MPERPSEPSPFWVPVRIFETTGRAW

SEQ ID NO: 512 - protein, 19 aa, Homo sapien
MSEEILFPTNNSIPRQTIT

SEQ ID NO: 513 - protein, 68 aa, Homo sapien
MGERQGVCTCVYPRVNQEGTTRVLYSWNTVYYNLSLHIFHVPPNLNFTLKLSLKDSNLFLLSYGGKEV

SEQ ID NO: 514 - protein, 52 aa, Homo sapien
MTHWFLMKGNLTKKTWSNKVIPWLRCKKTCFITGPYKFTLMQYSFSKGNIII

SEQ ID NO: 515 - protein, 116 aa, Homo sapien
MSGKVTKPKEEKDASKGKPARRVRLLSFPSFPSPPRVRAALRRLLASFPEPKLPMTSATPGEKGGQRSLGGGSRFAPLSLLPRGIVDPRVPPASSTSPLDARWWRCGQTKLLQPGA

SEQ ID NO: 516 - protein, 261 aa, Homo sapien
MRTSMKKVGMHHLSSSGGSYYLILDDAPPGTQEYIMLRQDSIQSAELKKKESPFRAKCHEIFCCPLKQVHHKENTEPEEPQLKGIVTKLYSRQGYHLQLQADGTIDGTKDEDSTYTLFNLIPVGLRVVAIQGVQTKLYLAMNSEGYLYTSELFTPECKFKESVFENYYVTYSSMIYRQQQSGRGWYLGLNKEGEIMKGNHVKKNKPAAHFLPKPLKVAMYKEPSLHDLTEFSRSGSGTPTKSRSVSGVLNGGKSMSHNEST

SEQ ID NO: 517 - protein, 65 aa, Homo sapien
LTGWHYTSHVGEQVELKPCEVAMYKEPSLHDLTEFSRSGSGTPTKSRSVSGVLNGGKSMSHNEST

SEQ ID NO: 518 - protein, 123 aa, Homo sapien
VPRLPALPRYHRPCQGPPERFLRLAASGPVSLHVSELPSQRRKHMLLGPTAAPHGCTCHQKIVVQSGIAFSSQSTISHAVMSPVQPLGQKISCFYKPTALQVLHKEWKINLSVIKSIFPEEDC

SEQ ID NO: 519 - protein, 110 aa, Homo sapien
VPRLPALPRYHRPCQGPPERFLRLAASGPVSLHVSELPSQRRKHMLLGPTAAPHGCTCHQKIVVQSGIAFSSQSTISHAVMSPVQPLGQKISCFYKPTALQVLHKRTKTI

SEQ ID NO: 520 - protein, 184 aa, Homo sapien
MNLAEICDNAKKGREYALLGNYDSSMVYYQGVMQQIQRHCQSVRDPAIKGKWQQVRQELLEEYEQVKSIVSTLESFKIDKPPDFPVSCQDEPFRDPAVWPPPVPAEHRAPPQIRRPNREVRPLRKEMAGVGARGPVGRAHPISKSEKPSTSRDKDYRARGRDDKARCCLSVIHSLEAQDFWWML

SEQ ID NO: 521 - protein, 35 aa, Homo sapien
QREEREKERGAEGKGERESTRDGKERLRVSEARKR

SEQ ID NO: 522 - protein, 1203 aa, Homo sapien
MDLRDFYLLAALIACLRLDSAIAQELIYTIREELPENVPIGNIPKDLNISHINAATGTSASLVYRLVSKAGDAPLVKVSSSTGEIFTTSNRIDREKLCAGASYAEENECFFELEVVILPNDFFRLIKIKIIVKDTNDNAPMFPSPVINISIPENTLINSRFPIPSATDPDTGFNGVQHYELLNGQSVFGLDIVETPEGEKWPQLIVQQNLDREQKDTYVMKIKVEDGGTPQKSSTAILQVTVSDVNDNRPVFKEGQVEVHIPENAPVGTSVIQLHATDADIGSNAEIRYIFGAQVAPATKRLFALNNTTGLITVQRSLDREETAIHKVTVLASDGSSTPARATVTINVTDVNDNPPNIDLRYIISPINGTVYLSEKDPVNTKIALITVSDKDTDVNGKVICFIEREVPFHLKAVYDNQYLLETSSLLDYEGTKEFSFKIVASDSGKPSLNQTALVRVKLEDENDNPPIFNQPVIELSVSENNRRGLYLTTISATDEDSGKNADIVYQLGPNASFFDLDRKTGVLTASRVFDREEQERFIFTVTARDNGTPPLQSQAAVIVTVLDENDNSPKFTHNHFQFFVSENLPKYSTVGVITVTDADAGENKAVTLSILNDNDNFVLDPYSGVIKSNVSFDREQQSSYTFDVKATDGGQPPRSSTAKVTINVMDVNDNSPVVISPPSNTSFKLVPLSAIPGSVVAEVFAVDVDTGMNAELKYTIVSGNNKGLFRIDPVTGNITLEEKPAPTDVGLHRLVVNISDLGYPKSLHTLVLVFLYVNDTAGNASYIYDLIRRTMETPLDRNIGDSSQPYQNEDYLTIMIAIIAGAMVVIVVIFVTVLVRCRHASRFKAAQRSKQGAEWMSPNQENKQNKKKKRKKRKSPKSSLLNFVTIEESKPDDAVHEPINGTISLPAELEEQSIGRFDWGPAPPTTFKPNSPDLAKHYKSASPQPAFHLKPDTPVSVKKHHVIQELPLDNTFVGGCDTLSKRSSTSSDHFSASECSSQGGFKTKGPLHTRQSQRRVTFHLPDGSQESCSDSGLGDHEPVGSGTLISHPLPLVQPQDEFYDQASPDKRTEADGNSDPNSDGPLGPRGLAEATEMCTQECLVLGHSDNCWMPPGLGPYQHPKSPLSTFAPQKEWVKKDKLVNGHTLTRAWKEDSNRNQFNDRKQYGSNEGHFNNGSHMTDIPLANLKSYKQAGGATESPKEHQL

SEQ ID NO: 523 - protein, 1032 aa, Homo sapien
MDLRDFYLLAALIACLRLDSAIAQELIYTIREELPENVPIGNIPKDLNISHINAATGTSASLVYRLVSKAGDAPLVKVSSSTGEIFTTSNRIDREKLCAGASYAEENECFFELEVVILPNDFFRLIKIKIIVKDTNDNAPMFPSPVINISIPENTLINSRFPIPSATDPDTGFNGVQHYELLNGQSVFGLDIVETPEGEKWPQLIVQQNLDREQKDTYVMKIKVEDGGTPQKSSTAILQVTVSDVNDNRPVFKEGQVEVHIPENAPVGTSVIQLHATDADIGSNAEIRYIFGAQVAPATKRLFALNNTTGLITVQRSLDREETAIHKVTVLASDGSSTPARATVTINVTDVNDNPPNIDLRYIISPINGTVYLSEKDPVNTKIALITVSDKDTDVNGKVICFIEREVPFHLKAVYDNQYLLETSSLLDYEGTKEFSFKIVASDSGKPSLNQTALVRVKLEDENDNPPIFNQPVIELSVSENNRRGLYLTTISATDEDSGKNADIVYQLGPNASFFDLDRKTGVLTASRVFDREEQERFIFTVTARDNGTPPLQSQAAVIVTVLDENDNSPKFTHNHFQFFVSENLPKYSTVGVITVTDADAGENKAVTLSILNDNDNFVLDPYSGVIKSNVSFDREQQSSYTFDVKATDGGQPPRSSTAKVTINVMDVNDNSPVVISPPSNTSFKLVPLSAIPGSVVAEVFAVDVDTGMNAELKYTIVSGNNKGLFRIDPVTGNITLEEKPAPTDVGLHRLVVNISDLGYPKSLHTLVLVFLYVNDTAGNASYIYDLIRRTMETPLDRNIGDSSQPYQNEDYLTIMIAIIAGAMVVIVVIFVTVLVRCRHASRFKAAQRSKQGAEWMSPNQENKQNKKKKRKKRKSPKSSLLNFVTIEESKPDDAVHEPINGTISLPAELEEQSIGRFDWGPAPPTTFKPNSPDLAKHYKSASPQPAFHLKPDTPVSVKKHHVIQELPLDNTFVGGCDTLSKRSSTSSDHFSASECSSQGGFKTKGPLHTRQVNEHFYWSISTAYKCPVNQY

SEQ ID NO: 524 - protein, 1120 aa, Homo sapien
MDLRDFYLLAALIACLRLDSAIAQELIYTIREELPENVPIGNIPKDLNISHINAATGTSASLVYRLVSKAGDAPLVKVSSSTGEIFTTSNRIDREKLCAGASYAEENECFFELEVVILPNDFFRLIKIKIIVKDTNDNAPMFPSPVINISIPENTLINSRFPIPSATDPDTGFNGVQHYELLNGQSVFGLDIVETPEGEKWPQLIVQQNLDREQKDTYVMKIKVEDGGTPQKSSTAILQVTVSDVNDNRPVFKEGQVEVHIPENAPVGTSVIQLHATDADIGSNAEIRYIFGAQVAPATKRLFALNNTTGLITVQRSLDREETAIHKVTVLASDGSSTPARATVTINVTDVNDNPPNIDLRYIISPINGTVYLSEKDPVNTKIALITVSDKDTDVNGKVICFIEREVPFHLKAVYDNQYLLETSSLLDYEGTKEFSFKIVASDSGKPSLNQTALVRVKLEDENDNPPIFNQPVIELSVSENNRRGLYLTTISATDEDSGKNADIVYQLGPNASFFDLDRKTGVLTASRVFDREEQERFIFTVTARDNGTPPLQSQAAVIVTVLDENDNSPKFTHNHFQFFVSENLPKYSTVGVITVTDADAGENKAVTLSILNDNDNFVLDPYSGVIKSNVSFDREQQSSYTFDVKATDGGQPPRSSTAKVTINVMDVNDNSPVVISPPSNTSFKLVPLSAIPGSVVAEVFAVDVDTGMNAELKYTIVSGNNKGLFRIDPVTGNITLEEKPAPTDVGLHRLVVNISDLGYPKSLHTLVLVFLYVNDTAGNASYIYDLIRRTMETPLDRNIGDSSQPYQNEDYLTIMIAIIAGAMVVIVVIFVTVLVRCRHASRFKAAQRSKQGAEWMSPNQENKQNKKKKRKKRKSPKSSLLNFVTIEESKPDDAVHEPINGTISLPAELEEQSIGRFDWGPAPPTTFKPNSPDLAKHYKSASPQPAFHLKPDTPVSVKKHHVIQELPLDNTFVGGCDTLSKRSSTSSDHFSASECSSQGGFKTKGPLHTRQCNSHSKSDNIPVTPQKCPSSTGFHIQENEESHYESQRRVTFHLPDGSQESCSDSGLGDHEPVGSGTLISHPLPLVQPQDEFYDQASPDKRTEADGNSDPNSGESPSKF

SEQ ID NO: 525 - protein, 102 aa, Homo sapien
MTRPLRTRGLKQMATLIPTLVSPLQNFDCLELFWFCSALELSKIIVGGKDEHLVIFLLALLLLLYSLRYTFNMFDMILAVKLYDVSSFYEPLKKKKTCYKYN

SEQ ID NO: 526 - protein, 1237 aa, Homo sapien
MDLRDFYLLAALIACLRLDSAIAQELIYTIREELPENVPIGNIPKDLNISHINAATGTSASLVYRLVSKAGDAPLVKVSSSTGEIFTTSNRIDREKLCAGASYAEENECFFELEVVILPNDFFRLIKIKIIVKDTNDNAPMFPSPVINISIPENTLINSRFPIPSATDPDTGFNGVQHYELLNGQSVFGLDIVETPEGEKWPQLIVQQNLDREQKDTYVMKIKVEDGGTPQKSSTAILQVTVSDVNDNRPVFKEGQVEVHIPENAPVGTSVIQLHATDADIGSNAEIRYIFGAQVAPATKRLFALNNTTGLITVQRSLDREETAIHKVTVLASDGSSTPARATVTINVTDVNDNPPNIDLRYIISPINGTVYLSEKDPVNTKIALITVSDKDTDVNGKVICFIEREVPFHLKAVYDNQYLLETSSLLDYEGTKEFSFKIVASDSGKPSLNQTALVRVKLEDENDNPPIFNQPVIELSVSENNRRGLYLTTISATDEDSGKNADIVYQLGPNASFFDLDRKTGVLTASRVFDREEQERFIFTVTARDNGTPPLQSQAAVIVTVLDENDNSPKFTHNHFQFFVSENLPKYSTVGVITVTDADAGENKAVTLSILNDNDNFVLDPYSGVIKSNVSFDREQQSSYTFDVKATDGGQPPRSSTAKVTINVMDVNDNSPVVISPPSNTSFKLVPLSAIPGSVVAEVFAVDVDTGMNAELKYTIVSGNNKGLFRIDPVTGNITLEEKPAPTDVGLHRLVVNISDLGYPKSLHTLVLVFLYVNDTAGNASYIYDLIRRTMETPLDRNIGDSSQPYQNEDYLTIMIAIIAGAMVVIVVIFVTVLVRCRHASRFKAAQRSKQGAEWMSPNQENKQNKKKKRKKRKSPKSSLLNFVTIEESKPDDAVHEPINGTISLPAELEEQSIGRFDWGPAPPTTFKPNSPDLAKHYKSASPQPAFHLKPDTPVSVKKHHVIQELPLDNTFVGGCDTLSKRSSTSSDHFSASECSSQGGFKTKGPLHTRQCNSHSKSDNIPVTPQKCPSSTGFHIQENEESHYESQRRVTFHLPDGSQESCSDSGLGDHEPVGSGTLISHPLPLVQPQDEFYDQASPDKRTEADGNSDPNSDGPLGPRGLAEATEMCTQECLVLGHSDNCWMPPGLGPYQHPKSPLSTFAPQKEWVKKDKLVNGHTLTRAWKEDSNRNQFNDRKQYGSNEGHFNNGSHMTDIPLANLKSYKQAGGATESPKEHQL

SEQ ID NO: 527 - protein, 1180 aa, Homo sapien
MDLRDFYLLAALIACLRLDSAIAQELIYTIREELPENVPIGNIPKDLNISHINAATGTSASLVYRLVSKAGDAPLVKVSSSTGEIFTTSNRIDREKLCAGASYAEENECFFELEVVILPNDFFRLIKIKIIVKDTNDNAPMFPSPVINISIPENTLINSRFPIPSATDPDTGFNGVQHYELLNGQSVFGLDIVETPEGEKWPQLIVQQNLDREQKDTYVMKIKVEDGGTPQKSSTAILQVTVSDVNDNRPVFKEGQVEVHIPENAPVGTSVIQLHATDADIGSNAEIRYIFGAQVAPATKRLFALNNTTGLITVQRSLDREETAIHKVTVLASDGSSTPARATVTINVTDVNDNPPNIDLRYIISPINGTVYLSEKDPVNTKIALITVSDKDTDVNGKVICFIEREVPFHLKAVYDNQYLLETSSLLDYEGTKEFSFKIVASDSGKPSLNQTALVRVKLEDENDNPPIFNQPVIELSVSENNRRGLYLTTISATDEDSGKNADIVYQLGPNASFFDLDRKTGVLTASRVFDREEQERFIFTVTARDNGTPPLQSQAAVIVTVLDENDNSPKFTHNHFQFFVSENLPKYSTVGVITVTDADAGENKAVTLSILNDNDNFVLDPYSGVIKSNVSFDREQQSSYTFDVKATDGGQPPRSSTAKVTINVMDVNDNSPVVISPPSNTSFKLVPLSAIPGSVVAEVFAVDVDTGMNAELKYTIVSGNNKGLFRIDPVTGNITLEEKPAPTDVGLHRLVVNISDLGYPKSLHTLVLVFLYVNDTAGNASYIYDLIRRTMETPLDRNIGDSSQPYQNEDYLTIMIAIIAGAMVVIVVIFVTVLVRCRHASRFKAAQRSKQGAEWMSPNQENKQNKKKKRKKRKSPKSSLLNFVTIEESKPDDAVHEPINGTISLPAELEEQSIGRFDWGPAPPTTFKPNSPDLAKHYKSASPQPAFHLKPDTPVSVKKHHVIQELPLDNTFVGGCDTLSKRSSTSSDHFSASECSSQGGFKTKGPLHTRQKCPSSTGFHIQENEESHYEPQDEFYDQASPDKRTEADGNSDPNSDGPLGPRGLAEATEMCTQECLVLGHSDNCWMPPGLGPYQHPKSPLSTFAPQKEWVKKDKLVNGHTLTRAWKEDSNRNQFNDRKQYGSNEGHFNNGSHMTDIPLANLKSYKQAGGATESPKEHQL

SEQ ID NO: 528 - protein, 107 aa, Homo sapien [sequence omitted]

SEQ ID NO: 529 - protein, 62 aa, Homo sapien [sequence omitted]

SEQ ID NO: 530 - protein, 12 aa, Homo sapien
MKEIGLNGKPEN

SEQ ID NO: 531 - protein, 124 aa, Homo sapien
MVGKAGDSGEMVGKAGDSGEGVGKVGDSVVMLWGRLGTLVRLWGRLGTLVRLWGRLRTLWYSDGEGWVHRGEEDWGHCSEVSGLTLELHMHRSGPKLHANSFVNSVSLWTVDCSSPSLVSECCT

SEQ ID NO: 532 - protein, 124 aa, Homo sapien
MLGKAGDSGEMVGKAGDSGEGVGKVGDSVVMLWGRLGTLVRLWGRLGTLVRLWGRLRTLWYSDGEGWVHRGEEDWGHCSEVSGLTLELHMHRSGPKLHANSFVNSVSLWTVDCSSPSLVSECCT

SEQ ID NO: 533 - protein, 28 aa, Homo sapien
MTSYGIFINYFSRCDLSIRLIFARGDVA

SEQ ID NO: 534 - protein, 35 aa, Homo sapien
MSPLSSVDFSILLPLKKLWAQTFSHISYSYGTVLT

SEQ ID NO: 535 - protein, 44 aa, Homo sapien
RLTRRRARTVAAAANMAETSEEVAVLVQRVVKDITNAFRRNPHM

SEQ ID NO: 536 - protein, 241 aa, Homo sapien
MAETSEEVAVLVQRVVKDITNAFRRNPHIDEIGLIPCPEARYNRSPIVLVENKLGVESWCVKFLLPYVHNKLLLYRTRKQWLNRDELIDVTCTLLLLNPDFTTAWNVRKELILSGTLNPIKDLHLGKLALTKFPKSPETWIHRRWVLQQLIQETSLPSFVTKGNLGTIPTERAQRLIQEEMEVCGEAAGRYPSNYNAWSHRIWVLQHLAKLDVKVGILLSPGQTACLPLKSSGSSSFSEEL

SEQ ID NO: 537 - protein, 126 aa, Homo sapien
MAETSEEVAVLVQRVVKDITNAFRRNPHIDEIGLIPCPEARYNRSPIVLVENKLGVESWCVKFLLPYVHNKLLLYRTRKQWLNRDELIDVTCTLLLLNPDFTTAWNVRYVIFISDMIKFVQISEDM

SEQ ID NO: 538 - protein, 316 aa, Homo sapien
MAETSEEVAVLVQRVVKDITNAFRRNPHIDEIGLIPCPEARYNRSPIVLVENKLGVESWCVKFLLPYVHNKLLLYRTRKQWLNRDELIDVTCTLLLLNPDFTTAWNVRKELILSGTLNPIKDLHLGKLALTKFPKSPETWIHRRWVLQQLIQETSLPSFVTKGNLGTIPTERAQRLIQEEMEVCGEAAGRYPSNYNAWSHRIWVLQHLAKLDVKILLDELSSTKHWASMHVSDHSGFHYRQFLLKSLISQTVIDSSVMEQNPLRSEPALVPPKDEEAAVSTEEPRINLPHLLEEEVEFSTDLIDSYPGHETLWCHR

SEQ ID NO: 539 - protein, 275 aa, Homo sapien
WQTVEVSETEERQNKWSSLDPVDRICSSLQDKKLPFYSFYIILDELIDVTCTLLLLNPDFTTAWNVRKELILSGTLNPIKDLHLGKLALTKFPKSPETWIHRRWVLQQLIQETSLPSFVTKGNLGTIPTERAQRLIQEEMEVCGEAAGRYPSNYNAWSHRIWVLQHLAKLDVKILLDELSSTKHWASMHVSDHSGFHYRQFLLKSLISQTVIDSSVMEQNPLRSEPALVPPKDEEAAVSTEEPRINLPHLLEEEVEFSTDLIDSYPGHETLWCHR

SEQ ID NO: 540 - protein, 26 aa, Homo sapien
MPWFMVTHSSSLKLAYFLGPSRALGP

SEQ ID NO: 541 - protein, 56 aa, Homo sapien
MHEVLEHLTLDSPSQHSSTFRVLTIPPFSLPPSQIPPPAHHSPCYFPLQSFCSFNL

SEQ ID NO: 542 - protein, 22 aa, Homo sapien
MRNFRVGHVILLLKNVKSHGQD

SEQ ID NO: 543 - protein, 98 aa, Homo sapien
MEEVHPEISVGWAGRYESGYKEKGMEYGVESHHHGLVMALAGAMGFLRSPRNERRRNKQWTSLFHYPWGKNRIPLGKSEGLSGREIRNEDTKFSADFS

SEQ ID NO: 544 - protein, 29 aa, Homo sapien
MNKAKYFGPKGDTSAQNSFRQTNFWSLQE

SEQ ID NO: 545 - protein, 794 aa, Homo sapien
MMQTKVQNKKRQVAFFILLMLWGEVGSESIQYSVLEETESGTFVANLTKDLGLRVGELASRGARVVFKGNRQHLQFDPQTHDLLLNEKLDREELCGSTEPCVLPFQVLLENPLQFFQASLRVRDINDHAPEFPAREMLLKISEITMPGKIFPLKMAHDLDTGSNGLQRYTISSNPHFHVLTRNRSEGRKFPELVLDKPLDREEQPQLRLTLIALDGGSPPRSGTSEIQIQVLDINDNVPEFAQELYEAQVPENNPLGSLVITVSARDLDAGSFGKVSYALFQVDDVNQPFEINAITGEIRLRKALDFEEIQSYDVDVEATDGGGLSGKCSLVVRVLDVNDNAPELTMSFFISLIPENLPEITVAVFSVSDADSGHNQQVICSIENNLPFLLRPSVENFYTLVTEGALDRESRAEYNITITVTDLGTPRLKTQQSITVQVSDVNDNVPAFTQTSYTLFVRENNSPALHIGSVSATDRDSGINAQVTYSLLPPQDPHLPLSSLVSINADNGHLFALRSLDYEALQSFEFRVGATDRGSPALSSEALVRLLVLDANDNSPFVLYPLQNGSAPCTELVPRAAEPGYLVTKVVAVDGDSGQNAWLSYQLLKATELGLFGVWAHNGEVRTARLLSERDAAKHRLVVLVKDNGEPPRSATATLHVLLVDGFSQPYLPLPEAAPAQAQADSLTVYLVVALASVSSLFLFSVLLFVAVRLCRRSRAASVGRYSVPEGPFPGHLVDVSGTGTLSQSYQYKVCLTGGSETNEFKFLKPIMPNFPPQGTEREMEETPTSRNSFPFS

SEQ ID NO: 546 - protein, 106 aa, Homo sapien
MTTEDQPHKEGIELAAGGEARGRGRQQRSFGCGRDLGVGRPDSSWGRRKATGQKEARSSPSPPLEPPTSPAQLSQPQRPRSGSQKQTMPQVSSAASGAGAGSATRR

SEQ ID NO: 547 - protein, 125 aa, Homo sapien
MCLSLCSEHWGSCPQKLIYQGGEQGRGTRNNGTAQERPPAGDPSTRHRVLPPFSLASLLTSLPWPGALPTLGRAPFPSAVSGQRERLRPGARGARGARGTPGPRPIPPPQPGPGGGSTGGAGPGA

SEQ ID NO: 548 - protein, 163 aa, Homo sapien
PYRTTFPLCCPSGSEGSRTHRGPLPTPGPGPALRAPGQAAVQLRASQWAGLSLGPAAMTTEDQPHKEGIELAAGGEARGRGRQQRSFGCGRDLGVGRPDSSWGRRKATGQKEARSSPSPPLEPPTSPAQLSQPQRPRSGSQKQTMPQVSSAASGAGAGSATRR

SEQ ID NO: 549 - protein, 110 aa, Homo sapien
MDPFILLHFCPSLLKNLKMFFPFSFFLLSSRKIKKQKTFTSPSSLCLPLDSLSLYCYMAPLRQGDKQAAFGLQCYLVTSAQKDFFPFCWDCASIMLIHFPFTMHNATNAI

SEQ ID NO: 550 - protein, 79 aa, Homo sapien
MAFQKYSGETVQERKQKDRKALHELKLEEWKGRLQVTEHLPEKIESSLQEDEPENDAKKIEALLNLPRNPSVIDKQDKD

SEQ ID NO: 551 - protein, 132 aa, Homo sapien
MEVPPPAPRSFLCRALCLFPRVFAAEAVTADSEVLEERQKRLPYVPEPYYPESGWDRLRELFGKDEQQRISKDLANICKTAATAGIIGWVYGGIPAFIHAKQQYIEQSQAEIYHNRFDAVVCTGDLKKFGAH

SEQ ID NO: 552 - protein, 139 aa, Homo sapien
LDSCSRGSQCHVYRNKDALSHFVIAGAVTGSLFRINVGLRGLVAGGIIGALLGTPVGGLLMAFQKYSGETVQERKQKDRKALHELKLEEWKGRLQVTEHLPEKIESSLQEDEPENDAKKIEALLNLPRNPSVIDKQDKD

SEQ ID NO: 553 - protein, 37 aa, Homo sapien
MTKHEWLWDIFWRQNHQKLVITTYEAVIKDEVIKFFV

SEQ ID NO: 554 - protein, 93 aa, Homo sapien
MQPISCSWTSPSHTRGRSCLSRAWSLLTPPEGPGCNRPTGQAEPVFVIGAPGFSKAGRQHPHGLRPMAQGRSLEKGAKPRWGCTEEEGRTPEA

SEQ ID NO: 555 - protein, 155 aa, Homo sapien
MSVWEGSRRGRGDLGPTWSPIHIEGPQYSHVRSAHTDSAHLQGIHMPTAQPAGRLVSPAASPTWGGAAEASLPFLVGALRLGGPTLLFCAAPTWLCPLLQTSALGHGAQAVGMLSACFRETWGTDDKYRLCLACGTVAPDGFGGVLRSSEATAGS

SEQ ID NO: 556 - protein, 197 aa, Homo sapien [sequence omitted]

SEQ ID NO: 557 - protein, 49 aa, Homo sapien
MEALPSPPCQGFYFTHYQMFSSVEFSPFIQLCESQPRSYCNGGKNLCMA

SEQ ID NO: 558 - protein, 62 aa, Homo sapien
MERCFCVHEMEASVLVRFHLDILSRGVQRTSINIPAAFFCCCCRSWQTDLKILYRNVKVPAE

SEQ ID NO: 559 - protein, 56 aa, Homo sapien
MERCFCVHEMEASVLVRFHLDILSRGVQRTSINIPAAFFCCCCRSWQTDLKILYRM

SEQ ID NO: 560 - protein, 47 aa, Homo sapien [sequence omitted]

SEQ ID NO: 561 - protein, 99 aa, Homo sapien
MCISPRGLWQGLLADSDDPISIVLPSSGYGAPCTTQAFISGCSRCVSLKLLKQWSGEPLAPFEATVYSVTNPKNILPVFIKEALKRSKQCHETKRIQGI

SEQ ID NO: 562 - protein, 51 aa, Homo sapien
LHEFGSRKRAPEGAESPQKRKFDRFPEVELLGQTSHSQEPESNPIQPRQSL

SEQ ID NO: 563 - protein, 265 aa, Homo sapien
MGEKVSEAPEPVPRGCSGHGSRTPASALVAASSPGASSAESSSGSETLSEEGEPGGFSREHQPPPPPPLGGTLGARAPAAWAPASVLLERGVLALPPPLPGGAVPPAPRGSSASQEEQDEELDHILSPPPMPFRKCSNPDVASGPGKSLKYKRQLSEDGRQLRRGSLGGALTGRYLLPNPVAGQAWPASAETSNLVRMRSQALGQSAPSLTASLKELSLPRRGSFLTPRSLSPTPSSPGSPCSPLLAFHFWSPVCPNAGRTSPLG

SEQ ID NO: 564 - protein, 2247 aa, Homo sapien
MGEKVSEAPEPVPRGCSGHGSRTPASALVAASSPGASSAESSSGSETLSEEGEPGGFSREHQPPPPPPLGGTLGARAPAAWAPASVLLERGVLALPPPLPGGAVPPAPRGSSASQEEQDEELDHILSPPPMPFRKCSNPDVASGPGKSLKYKRQLSEDGRQLRRGSLGGALTGRYLLPNPVAGQAWPASAETSNLVRMRSQALGQSAPSLTASLKELSLPRRGSLIDSQKWNCLVKRCRTSNRKSLIGNGQSPALPRPHSPLSAHAGNSPQDSPRNFSPSASAHFSFARRTDGRRWSLASLPSSGYGTNTPSSTVSSSCSSQEKLHQLPYQPTPDELHFLSKHFCTTESIATENRCRNTPMRPRSRSLSPGRSPACCDHEIIMMNHVYKERFPKATAQMEERLKEIITSYSPDNVLPLADGVLSFTHHQIIELARDCLDKSHQGLITSRYFLELQHKLDKLLQEAIRSESGELAFIKQLVRKILIVIARPARLLECLEFDPEEFYYLLEAAEGHAKEGQGIKTDIPRYIISQLGLNKDPLEEMAHLGNYDSGTAETPETDESVSSSNASLKLRRKPRESDFETIKLISNGAYGAVYFVRHKESRQRFAMKKINKQNLILRNQIQQAFVERDILTFAENPFVVSMYCSFETRRHLCMVMEYVEGGDCATLMKNMGPLPVDMARMYFAETVLALEYLHNYGIVHRDLKPDNLLVTSMGHIKLTDFGLSKVGLMSMTTNLYEGHIEKDAREFLDKQVCGTPEYIAPEVILRQGYGKPVDWWAMGIILYEFLVGCVPFFGDTPEELFGQVISDEINWPEKDEAPPPDAQDLITLLLRQNPLERLGTGGAYEVKQHRFFRSLDWNSLLRQKAEFIPQLESEDDTSYFDTRSEKYHHMETEEEDDTNDEDFNVEIRQFSSCSHRFSKVFSSIDRITQNSAEEKEDSVDKTKSTTLPSTETLSWSSEYSEMQQLSTSNSSDTESNRHKLSSGLLPKLAISTEGEQDEAASCPGDPHEEPGKPALPPEECAQEEPEVTTPASTISSSTLSVGSFSEHLDQINGRSECVDSTDNSSKPSSEPASHMARQRLESTEKKKISGKVTKSLSASALSLMIPGDMFAVSPLGSPMSPHSLSSDPSSSRDSSPSRDSSAASASPHQPIVIHSSGKNYGFTIRAIRVYVGDSDIYTVHHIVWNVEEGSPACQAGLKAGDLITHINGEPVHGLVHTEVIELLLKSGNKVSITTTPFENTSIKTGPARRNSYKSRMVRRSKKSKKKESLERRRSLFKKLAKQPSPLLHTSRSFSCLNRSLSSGESLPGSPTHSLSPRSPTPSYRSTPDFPSGTNSSQSSSPSSSAPNSPAGSGHIRPSTLHGLAPKLGGQRYRSGRRKSAGNIPLSPLARTPSPTPQPTSPQRSPSPLLGHSLGNSKIAQAFPSKMHSPPTIVRHIVRPKSAEPPRSPLLKRVQSEEKLSPSYGSDKKHLCSRKHSLEVTQEEVQREQSQREAPLQSLDENVCDVPPLSRARPVEQGCLKRPVSRKVGRQESVDDLDRDKLKAKVVVKKADGFPEKQESHQKSHGPGSDLENFALFKLEEREKKVYPKAVERSSTFENKASMQEAPPLGSLLKDALHKQASVRASEGAMSDGPVPAEHRQGGGDFRRAPAPGTLQDGLCHSLDRGISGKGEGTEKSSQAKELLRCEKLDSKLANIDYLRKKMSLEDKEDNLCPVLKPKMTAGSHECLPGNPVRPTGGQQEPPPASESRAFVSSTHAAQMSAVSFVPLKALTGRVDSGTEKPGLVAPESPVRKSPSEYKLEGRSVSCLKPIEGTLDIALLSGPQASKTELPSPESAQSPSPSGDVRASVPPVLPSSSGKKNDTTSARELSPSSLKMNKSYLLEPWFLPPSRGLQNSPAVSLPDPEFKRDRKGPHPTARSPGTVMESNPQQREGSSPKHQDHTTDPKLLTCLGQNLHSPDLARPRCPLPPEASPSREKPGLRESSERGPPTARSERSAARADTCREPSMELCFPETAKTSDNSKNLLSVGRTHPDFYTQTQAMEKAWAPGGKTNHKDGPGEARPPPRDNSSLHSAGIPCEKELGKVRRGVEPKPEALLARRSLQPPGIESEKSEKLSSFPSLQKDGAKEPERKEQPLQRHPSSIPPPPLTAKDLSSPAARQHCSSPSHASGREPGAKPSTAEPSSSPQDPPKPVAAHSESSSHKPRPATDGGRQAQWHETVPLSHWAEFFPIHGPPGKVSELLLQLP

SEQ ID NO: 565 - protein, 2383 aa, Homo sapien
MGEKVSEAPEPVPRGCSGHGSRTPASALVAASSPGASSAESSSGSETLSEEGEPGGFSREHQPPPPPPLGGTLGARAPAAWAPASVLLERGVLALPPPLPGGAVPPAPRGSSASQEEQDEELDHILSPPPMPFRKCSNPDVASGPGKSLKYKRQLSEDGRQLRRGSLGGALTGRYLLPNPVAGQAWPASAETSNLVRMRSQALGQSAPSLTASLKELSLPRRGSLIDSQKWNCLVKRCRTSNRKSLIGNGQSPALPRPHSPLSAHAGNSPQDSPRNFSPSASAHFSFARRTDGRRWSLASLPSSGYGTNTPSSTVSSSCSSQEKLHQLPYQPTPDELHFLSKHFCTTESIATENRCRNTPMRPRSRSLSPGRSPACCDHEIIMMNHVYKERFPKATAQMEERLKEIITSYSPDNVLPLADGVLSFTHHQIIELARDCLDKSHQGLITSRYFLELQHKLDKLLQEAIRSESGELAFIKQLVRKILIVIARPARLLECLEFDPEEFYYLLEAAEGHAKEGQGIKTDIPRYIISQLGLNKDPLEEMAHLGNYDSGTAETPETDESVSSSNASLKLRRKPRESDFETIKLISNGAYGAVYFVRHKESRQRFAMKKINKQNLILRNQIQQAFVERDILTFAENPFVVSMYCSFETRRHLCMVMEYVEGGDCATLMKNMGPLPVDMARMYFAETVLALEYLHNYGIVHRDLKPDNLLVTSMGHIKLTDFGLSKVGLMSMTTNLYEGHIEKDAREFLDKQVCGTPEYIAPEVILRQGYGKPVDWWAMGIILYEFLVGCVPFFGDTPEELFGQVISDEINWPEKDEAPPPDAQDLITLLLRQNPLERLGTGGAYEVKQHRFFRSLDWNSLLRQKAEFIPQLESEDDTSYFDTRSEKYHHMETEEEDDTNDEDFNVEIRQFSSCSHRFSKVFSSIDRITQNSAEEKEDSVDKTKSTTLPSTETLSWSSEYSEMQQLSTSNSSDTESNRHKLSSGLLPKLAISTEGEQDEAASCPGDPHEEPGKPALPPEECAQEEPEVTTPASTISSSTLSVGSFSEHLDQINGRSECVDSTDNSSKPSSEPASHMARQRLESTEKKKISGKVTKSLSASALSLMIPGDMFAVSPLGSPMSPHSLSSDPSSSRDSSPSRDSSAASASPHQPIVIHSSGKNYGFTIRAIRVYVGDSDIYTVHHIVWNVEEGSPACQAGLKAGDLITHINGEPVHGLVHTEVIELLLKSGNKVSITTTPFENTSIKTGPARRNSYKSRMVRRSKKSKKKESLERRRSLFKKLAKQPSPLLHTSRSFSCLNRSLSSGESLPGSPTHSLSPRSPTPSYRSTPDFPSGTNSSQSSSPSSSAPNSPAGSGHIRPSTLHGLAPKLGGQRYRSGRRKSAGNIPLSPLARTPSPTPQPTSPQRSPSPLLGHSLGNSKIAQAFPSKMHSPPTIVRHIVRPKSAEPPRSPLLKRVQSEEKLSPSYGSDKKHLCSRKHSLEVTQEEVQREQSQREAPLQSLDENVCDVPPLSRARPVEQGCLKRPVSRKVGRQESVDDLDRDKLKAKVVVKKADGFPEKQESHQKSHGPGSDLENFALFKLEEREKKVYPKAVERSSTFENKASMQEAPPLGSLLKDALHKQASVRASEGAMSDGPVPAEHRQGGGDFRRAPAPGTLQDGLCHSLDRGISGKGEGTEKSSQAKELLRCEKLDSKLANIDYLRKKMSLEDKEDNLCPVLKPKMTAGSHECLPGNPVRPTGGQQEPPPASESRAFVSSTHAAQMSAVSFVPLKALTGRVDSGTEKPGLVAPESPVRKSPSEYKLEGRSVSCLKPIEGTLDIALLSGPQASKTELPSPESAQSPSPSGDVRASVPPVLPSSSGKKNDTTSARELSPSSLKMNKSYLLEPWFLPPSRGLQNSPAVSLPDPEFKRDRKGPHPTARSPGTVMESNPQQREGSSPKHQDHTTDPKLLTCLGQNLHSPDLARPRCPLPPEASPSREKPGLRESSERGPPTARSERSAARADTCREPSMELCFPETAKTSDNSKNLLSVGRTHPDFYTQTQAMEKAWAPGGKTNHKDGPGEARPPPRDNSSLHSAGIPCEKELGKVRRGVEPKPEALLARRSLQPPGIESEKSEKLSSFPSLQKDGAKEPERKEQPLQRHPSSIPPPPLTAKDLSSPAARQHCSSPSHASGREPGAKPSTAEPSSSPQDPPKPVAAHSESSSHKPRPGPDPGPPKTKHPDRSLSSQKPSVGATKGKEPATQSLGGSSREGKGHSKSGPDVFPATPGSQNKASDGIGQGEGGPSVPLHTDRAPLDAKPQPTSGGRPLEVLEKPVHLPRPGHPGPSEPADQKLSAVGEKQTLSPKHPKPSTVKDRPISLSNEKDFVVRQRRGKESLRSSPHKKAL

SEQ ID NO: 566 - protein, 1250 aa, Homo sapien
MGEKVSEAPEPVPRGCSGHGSRTPASALVAASSPGASSAESSSGSETLSEEGEPGGFSREHQPPPPPPLGGTLGARAPAAWAPASVLLERGVLALPPPLPGGAVPPAPRGSSASQEEQDEELDHILSPPPMPFRKCSNPDVASGPGKSLKYKRQLSEDGRQLRRGSLGGALTGRYLLPNPVAGQAWPASAETSNLVRMRSQALGQSAPSLTASLKELSLPRRGSLIDSQKWNCLVKRCRTSNRKSLIGNGQSPALPRPHSPLSAHAGNSPQDSPRNFSPSASAHFSFARRTDGRRWSLASLPSSGYGTNTPSSTVSSSCSSQEKLHQLPYQPTPDELHFLSKHFCTTESIATENRCRNTPMRPRSRSLSPGRSPACCDHEIIMMNHVYKERFPKATAQMEERLKEIITSYSPDNVLPLADGVLSFTHHQIIELARDCLDKSHQGLITSRYFLELQHKLDKLLQEAIRSESGELAFIKQLVRKILIVIARPARLLECLEFDPEEFYYLLEAAEGHAKEGQGIKTDIPRYIISQLGLNKDPLEEMAHLGNYDSGTAETPETDESVSSSNASLKLRRKPRESDFETIKLISNGAYGAVYFVRHKESRQRFAMKKINKQNLILRNQIQQAFVERDILTFAENPFVVSMYCSFETRRHLCMVMEYVEGGDCATLMKNMGPLPVDMARMYFAETVLALEYLHNYGIVHRDLKPDNLLVTSMGHIKLTDFGLSKVGLMSMTTNLYEGHIEKDAREFLDKQVCGTPEYIAPEVILRQGYGKPVDWWAMGIILYEFLVGCVPFFGDTPEELFGQVISDEINWPEKDEAPPPDAQDLITLLLRQNPLERLGTGGAYEVKQHRFFRSLDWNSLLRQKAEFIPQLESEDDTSYFDTRSEKYHHMETEEEDDTNDEDFNVEIRQFSSCSHRFSKVFSSIDRITQNSAEEKEDSVDKTKSTTLPSTETLSWSSEYSEMQQLSTSNSSDTESNRHKLSSGLLPKLAISTEGEQDEAASCPGDPHEEPGKPALPPEECAQEEPEVTTPASTISSSTLSVGSFSEHLDQINGRSECVDSTDNSSKPSSEPASHMARQRLESTEKKKISGKVTKSLSASALSLMIPGDMFAVSPLGSPMSPHSLSSDPSSSRDSSPSRDSSAASASPHQPIVIHSSGKNYGFTIRAIRVYVGDSDIYTVHHIVWNVEEGSPACQAGLKAGDLITHINGEPVHGLVHTEVIELLLKVLYVLCQGHADETGSPKGLVPGD

SEQ ID NO: 567 - protein, 1335 aa, Homo sapien
MGEKVSEAPEPVPRGCSGHGSRTPASALVAASSPGASSAESSSGSETLSEEGEPGGFSREHQPPPPPPLGGTLGARAPAAWAPASVLLERGVLALPPPLPGGAVPPAPRGSSASQEEQDEELDHILSPPPMPFRKCSNPDVASGPGKSLKYKRQLSEDGRQLRRGSLGGALTGRYLLPNPVAGQAWPASAETSNLVRMRSQALGQSAPSLTASLKELSLPRRGSLIDSQKWNCLVKRCRTSNRKSLIGNGQSPALPRPHSPLSAHAGNSPQDSPRNFSPSASAHFSFARRTDGRRWSLASLPSSGYGTNTPSSTVSSSCSSQEKLHQLPYQPTPDELHFLSKHFCTTESIATENRCRNTPMRPRSRSLSPGRSPACCDHEIIMMNHVYKERFPKATAQMEERLKEIITSYSPDNVLPLADGVLSFTHHQIIELARDCLDKSHQGLITSRYFLELQHKLDKLLQEAIRSESGELAFIKQLVRKILIVIARPARLLECLEFDPEEFYYLLEAAEGHAKEGQGIKTDIPRYIISQLGLNKDPLEEMAHLGNYDSGTAETPETDESVSSSNASLKLRRKPRESDFETIKLISNGAYGAVYFVRHKESRQRFAMKKINKQNLILRNQIQQAFVERDILTFAENPFVVSMYCSFETRRHLCMVMEYVEGGDCATLMKNMGPLPVDMARMYFAETVLALEYLHNYGIVHRDLKPDNLLVTSMGHIKLTDFGLSKVGLMSMTTNLYEGHIEKDAREFLDKQVCGTPEYIAPEVILRQGYGKPVDWWAMGIILYEFLVGCVPFFGDTPEELFGQVISDEINWPEKDEAPPPDAQDLITLLLRQNPLERLGTGGAYEVKQHRFFRSLDWNSLLRQKAEFIPQLESEDDTSYFDTRSEKYHHMETEEEDDTNDEDFNVEIRQFSSCSHRFSKVFSSIDRITQNSAEEKEDSVDKTKSTTLPSTETLSWSSEYSEMQQLSTSNSSDTESNRHKLSSGLLPKLAISTEGEQDEAASCPGDPHEEPGKPALPPEECAQEEPEVTTPASTISSSTLSVGSFSEHLDQINGRSECVDSTDNSSKPSSEPASHMARQRLESTEKKKISGKVTKSLSASALSLMIPGDMFAVSPLGSPMSPHSLSSDPSSSRDSSPSRDSSAASASPHQPIVIHSSGKNYGFTIRAIRVYVGDSDIYTVHHIVWNVEEGSPACQAGLKAGDLITHINGEPVHGLVHTEVIELLLKSGNKVSITTTPFENTSIKTGPARRNSYKSRMVRRSKKSKKKESLERRRSLFKKLAKQPSPLLHTSRSFSCLNRSLSSGESLPGSPTHSLSPRSPTPSYRSTPDFPSGE

SEQ ID NO: 568 - protein, 940 aa, Homo sapien
MGEKVSEAPEPVPRGCSGHGSRTPASALVAASSPGASSAESSSGSETLSEEGEPGGFSREHQPPPPPPLGGTLGARAPAAWAPASVLLERGVLALPPPLPGGAVPPAPRGSSASQEEQDEELDHILSPPPMPFRKCSNPDVASGPGKSLKYKRQLSEDGRQLRRGSLGGALTGRYLLPNPVAGQAWPASAETSNLVRMRSQALGQSAPSLTASLKELSLPRRGSLIDSQKWNCLVKRCRTSNRKSLIGNGQSPALPRPHSPLSAHAGNSPQDSPRNFSPSASAHFSFARRTDGRRWSLASLPSSGYGTNTPSSTVSSSCSSQEKLHQLPYQPTPDELHFLSKHFCTTESIATENRCRNTPMRPRSRSLSPGRSPACCDHEIIMMNHVYKERFPKATAQMEERLKEIITSYSPDNVLPLADGVLSFTHHQIIELARDCLDKSHQGLITSRYFLELQHKLDKLLQEFRSESGELAFIKQLVRKILIVIARPARLLECLEFDPEEFYYLLEAAEGHAKEGQGIKTDIPRYIISQLGLNKDPLEEMAHLGNYDSGTAETPETDESVSSSNASLKLRRKPRESDFETIKLISNGAYGAVYFVRHKESRQRFAMKKINKQNLILRNQIQQAFVERDILTFAENPFVVSMYCSFETRRHLCMVMEYVEGGDCATLMKNMGPLPVDMARMYFAETVLALEYLHNYGIVHRDLKPDNLLVTSMGHIKLTDFGLSKVGLMSMTTNLYEGHIEKDAREFLDKQVCGTPEYIAPEVILRQGYGKPVDWWAMGIILYEFLVGCVPFFGDTPEELFGQVISDEINWPEKDEAPPPDAQDLITLLLRQNPLERLGTGGAYEVKQHRFFRSLDWNSLLRQKAEFIPQLESEDDTSYFDTRSEKYHHMETEEEDDTNDEDFNVEIRQFSSCSHRFSKVSEMWHKHTESLWEDLPLAR

SEQ ID NO: 569 - protein, 319 aa, Homo sapien
MGEKVSEAPEPVPRGCSGHGSRTPASALVAASSPGASSAESSSGSETLSEEGEPGGFSREHQPPPPPPLGGTLGARAPAAWAPASVLLERGVLALPPPLPGGAVPPAPRGSSASQEEQDEELDHILSPPPMPFRKCSNPDVASGPGKSLKYKRQLSEDGRQLRRGSLGGALTGRYLLPNPVAGQAWPASAETSNLVRMRSQALGQSAPSLTASLKELSLPRRGSLIDSQKWNCLVKRCRTSNRKSLIGNGQSPALPRPHSPLSAHAGNSPQDSPRNFSPSASAHFSFARRTDGRRWSLASLPSSGYGTNTPSSTVSVSA

SEQ ID NO: 570 - protein, 250 aa, Homo sapien
MGEKVSEAPEPVPRGCSGHGSRTPASALVAASSPGASSAESSSGSETLSEEGEPGGFSREHQPPPPPPLGGTLGARAPAAWAPASVLLERGVLALPPPLPGGAVPPAPRGSSASQEEQDEELDHILSPPPMPFRKCSNPDVASGPGKSLKYKRQLSEDGRQLRRGSLGGALTGRYLLPNPVAGQAWPASAETSNLVRMRSQALGQSAPSLTASLKELSLPRRGSLCRSSDCDWVIDKRSERNCFLGKMLL

SEQ ID NO: 571 - protein, 277 aa, Homo sapien
MGEKVSEAPEPVPRGCSGHGSRTPASALVAASSPGASSAESSSGSETLSEEGEPGGFSREHQPPPPPPLGGTLGARAPAAWAPASVLLERGVLALPPPLPGGAVPPAPRGSSASQEEQDEELDHILSPPPMPFRKCSNPDVASGPGKSLKYKRQLSEDGRQLRRGSLGGALTGRYLLPNPVAGQAWPASAETSNLVRMRSQALGQSAPSLTASLKELSLPRRGSLIDSQKWNCLVKRLTPRSLSPTPSSPGSPCSPLLAFHFWSPVCPNAGRTSPLG

SEQ ID NO: 572 - protein, 257 aa, Homo sapien
MGEKVSEAPEPVPRGCSGHGSRTPASALVAASSPGASSAESSSGSETLSEEGEPGGFSREHQPPPPPPLGGTLGARAPAAWAPASVLLERGVLALPPPLPGGAVPPAPRGSSASQEEQDEELDHILSPPPMPFRKCSNPDVASGPGKSLKYKRQLSEDGRQLRRGSLGGALTGRYLLPNPVAGQAWPASAETSNLVRMRSQALGQSAPSLTASLLSLFLVFKQIDICGGALCSRTFLMLMILSSWPLCLPLAPVVEL

SEQ ID NO: 573 - protein, 221 aa, Homo sapien
MAPEPVPRGCSGHGSRTPASALVAASSPGASSAESSSGSETLSEEGEPGGFSREHQPPPPPPLGGTLGARAPAAWAPASVLLERGVLALPPPLPGGAVPPAPRGSSASQEEQDEELDHILSPPPMPFRKCSNPDVASGPGKSLKYKRQLSEDGRQLRRGSLGGALTGRYLLPNPVAGQAWPASAETSNLVRMRSQALGQSAPSLTASLPVCPNAGRTSPLG

SEQ ID NO: 574 - protein, 135 aa, Homo sapien [sequence omitted]

SEQ ID NO: 575 - protein, 54 aa, Homo sapien
MSKVQKTTTKNILHIVTFFLRQCNNVQDISKLEKQRKSKGQITRRQEMLMKRKR

SEQ ID NO: 576 - protein, 315 aa, Homo sapien
MEELDALLEELERSTLQDSDEYSNPAPLPLDQHSRKETNLDETSEILSIQDNTSPLPAQLVYTTNIQELNVYSEAQEPKESPPPSKTSAAAQLDELMAHLTEMQAKVAVRADAGKKHLPDKQDHKASLDSMLGGLEQELQDLGIATVPKGHCASCQKPIAGKVIHALGQSWHPEHFVCTHCKEEIGSSPFFERSGLAYCPNDYHQLFSPRCAYCAAPILDKVLTAMNQTWHPEHFFCSHCGEVFGAEGFHEKDKKPYCRKDFLAMFSPKCGGCNRPVLENYLSAMDTVWHPECFVCGVCIITFLSDLGKVKGSPL

SEQ ID NO: 577 - protein, 121 aa, Homo sapien
QFFYTKHLCAVEQKKCSGCQVWFIAERCLVQKDCFTSFSTGSFFELDGRPFCELHYHHRRGTLCHGCGQPITGRCISAMGYKFHPEHFVCAFCLTQLSKGIFREQNDKTYCQPCFNKLFPL

SEQ ID NO: 578 - protein, 20 aa, Homo sapien
MLIRLLQLSFVSPTRLMALS

SEQ ID NO: 579 - protein, 23 aa, Homo sapien
MFVCLSELKPRHVLTEVKSDLAN

SEQ ID NO: 580 - protein, 140 aa, Homo sapien [sequence omitted]

SEQ ID NO: 581 - protein, 107 aa, Homo sapien
MTSFSTSAQCSTSDSACRISPGQINQVRPKLPLLKILHAAGAQGEMFTVKEVMHYLGQYIMVKQLYDQQEQHMVYCGGDLLGELLGRQSFSVKDPSPLYDRFLHCIT

SEQ ID NO: 582 - protein, 377 aa, Homo sapien
MELLHPLVSVISTALMDTFPFFQQQSAEESSTSRKRTTEDDIPTLPTSEHKCIHSREDEDLIENLAQDETSRLDLGFEEWDVAGLPWWFLGNLRSNYTPRSNGSTDLQTNQDVGTAIVSDTTDDLWFLNESVSEQLGVGIKVEAADTEQTSEEVGKVSDKKVIEVGKNDDLEDSKSLSDDTDVEVTSEDEWQCTECKKFNSPSKRYCFRCWALRKDWYSDCSKLTHSLSTSDITAIPEKENEGNDVPDCRRTISAPVVRPKDAYIKKENSKLFDPCNSVEFLDLAHSSESQETISSMGEQLDNLSEQRTDTENMEDCQNLLKPCSLCEKRPRDGNIIHGRTGHLVTCFHCARRLKKAGASCPICKKEIQLVIKVFIA

SEQ ID NO: 583 - protein, 379 aa, Homo sapien
MPNFVVDWRVYTDSLFLTVDFGLCAEQSAEESSTSRKRTTEDDIPTLPTSEHKCIHSREDEDLIENLAQDETSRLDLGFEEWDVAGLPWWFLGNLRSNYTPRSNGSTDLQTNQDVGTAIVSDTTDDLWFLNESVSEQLGVGIKVEAADTEQTSEEVGKVSDKKVIEVGKNDDLEDSKSLSDDTDVEVTSEDEWQCTECKKFNSPSKRYCFRCWALRKDWYSDCSKLTHSLSTSDITAIPEKENEGNDVPDCRRTISAPVVRPKDAYIKKENSKLFDPCNSVEFLDLAHSSESQETISSMGEQLDNLSEQRTDTENMEDCQNLLKPCSLCEKRPRDGNIIHGRTGHLVTCFHCARRLKKAGASCPICKKEIQLVIKVFIA

SEQ ID NO: 584 - protein, 343 aa, Homo sapien [sequence omitted]

SEQ ID NO: 585 - protein, 148 aa, Homo sapien [sequence omitted]

SEQ ID NO: 586 - protein, 59 aa, Homo sapien
MPATPSSPCSLGFLPSHSALSMGAWVSQIKLTLLQTPDMQLPPPDSPLPPPSLPSSAPF

SEQ ID NO: 587 - protein, 111 aa, Homo sapien
MGKGKRETKNIGKRTDETTKEEPIPNERGLGQAYCTLFQILTQRYLIASGQCFTVYKGLCYQDNPTVTSILDARSTKSGSRLHSKYTRSRDLNLFSVFLQCYYFIPGIPLP

SEQ ID NO: 588 - protein, 106 aa, Homo sapien
MGKGKRETKNIGKRTDETTKEEPIPNERGLGQAYCTLFQILTQRYLIASGQCFTVYKGLCYQDNPTVTSILDARSTKSGSRLHSKYTRSRDLNLFSVFLQCYYFIP

SEQ ID NO: 589 - protein, 121 aa, Homo sapien
MATEGDVELELETETSGPERPPEKPRKHDSGAADLERVTDYAEEKEIQSSNLETAMSVIGDRRSREQKAKQEREKELAKVTIKKEDLELIMTEMEISRAAAERSLREHMGNVVEALIALTN

SEQ ID NO: 590 - protein, 98 aa, Homo sapien
ITSEFTSNITSEFTSNAAEAEKGKREEGGTQVALWLRVQPSCPSPVCLEPVPTTLAFPPVVLTGPSTDGIPFALSLQRVPFVLPSPQVASLPLGHSRG

SEQ ID NO: 591 - protein, 116 aa, Homo sapien
MTRGNQRELARQKNMKKQSDSVKGKRRDDGLFCCRPQAEGLGDHAAEAEKGKREEGGTQVALWLRVQPSCPSPVCLEPVPTTLAFPPVVLTGPSTDGIPFALSLQRVLQAGILKNT

SEQ ID NO: 592 - protein, 202 aa, Homo sapien [sequence omitted]

SEQ ID NO: 593 - protein, 202 aa, Homo sapien [sequence omitted]

SEQ ID NO: 594 - protein, 79 aa, Homo sapien
MTRGNQRELARQKNMKKQSDSVKGKRRDDGLFCCRPQAEGLGDHAAEAEKGKREEGGTQVALWLRVHPLPTAVEGPSER

SEQ ID NO: 595 - protein, 126 aa, Homo sapien
MTRGNQRELARQKNMKKQSDSVKGKRRDDGLFCCRPQAEGLGDHAAEAEKGKREEGGTQVALWLRVQPSCPSPVCLEPVPTTLAFPPVVLTGPSTDGIPFALSLQRVPFVLPSPQVASLPLGHSRG

SEQ ID NO: 596 - protein, 121 aa, Homo sapien; identical to SEQ ID NO: 589

SEQ ID NO: 597 - protein, 203 aa, Homo sapien
MTRGNQRELARQKNMKKQSDSVKGKRRDDGLFCCRPQAEASRTGAERRCGPGPAPPPPRAEAVSVAGSRREVGLMRRRGEIDMATEGDVELELETETSGPERPPEKPRKHDSGAADLERVTDYAEEKEIQSSNLETAMSVIGDRRSREQKAKQEREKELAKVTIKKEDLELIMTEMEISRAAAERSLREHMGNVVEALIALTN

SEQ ID NO: 598 - protein, 99 aa, Homo sapien
PRLARQEETEAEGLGDHAAEAEKGKREEGGTQVALWLRVQPSCPSPVCLEPVPTTLAFPPVVLTGPSTDGIPFALSLQRVPFVLPSPQVASLPLGHSRG

SEQ ID NO: 599 - protein, 78 aa, Homo sapien
MTRGNQRELARQKNMKKQSDSVKGKRRDDGLFCCRPQAEGLGDHAAEAEKGKREEGGTQVALWLRVQQCAGLRFQHRG

SEQ ID NO: 600 - protein, 54 aa, Homo sapien
MYDFFKSTMCRQCFHILSLPVMGTVVRCLDSPSEIKAPLLLQLLGVVTYRECLS

SEQ ID NO: 601 - protein, 36 aa, Homo sapien
MVGPLGNPEKSNRRKPLPPGEQEGQKKKVMKPELGS

SEQ ID NO: 602 - protein, 57 aa, Homo sapien [sequence omitted]

SEQ ID NO: 603 - protein, 83 aa, Homo sapien
MQMQTSGSLEGFGTELDWRLVRSLWRGKESNKSHGLEGVFPPARGASQWAWMGGRGPSGKAGQPQRAGRLGDCESPSTLKSGG

SEQ ID NO: 604 - protein, 11 aa, Homo sapien
MCTYYVPTNNK

SEQ ID NO: 605 - protein, 37 aa, Homo sapien
MTLSNTTELQFLSPFNVSGTNLSAPHPSIYLILTTTL

SEQ ID NO: 606 - protein, 44 aa, Homo sapien [sequence omitted]

SEQ ID NO: 607 - protein, 110 aa, Homo sapien [sequence omitted]

SEQ ID NO: 608 - protein, 123 aa, Homo sapien
  MISC_FEATURE (3)..(3): X=any amino acid
  MISC_FEATURE (6)..(6): X=any amino acid
  MISC_FEATURE (8)..(9): X=any amino acid
GGXPVXWXXTARDSITLLRRAHHLRLKILYFWNCSILLVTVGNLLLCLIYKLNFRYVCTGKNVVYSIVYMYRKKTYYLWFQVSTAGLRTYPPQVRGDCCTKNIGRPLDYIHSFLNRRKIPGTV

SEQ ID NO: 609 - protein, 106 aa, Homo sapien
MAVLEPEVLSVHTTWTTRGSNLKNRIPFGEERAGLQEKHPGGGRRSVICPKVRFQASILQKKHPRGGRRIVKHLRSALASRNLSSSVETPRRLISSSVLKQWPRVW

SEQ ID NO: 610 - protein, 195 aa, Homo sapien
MAQGLVTFADVAIDFSQEEWACLNSAQRDLYWDVMLENYSNLVSLDLESAYENKSLPTEKNIHEIRASKRNSDRRSKSLGRNWICEGTLERPQRSRGRYVNQMIINYVKRPATREGTPPRTHQRHHKENSFECKDCGKAFSRGYQLSQHQKIHTGEKPYECKECKKAFRWGNQLTQHQKIHTGETLWVYRMWEEL

SEQ ID NO: 611 - protein, 138 aa, Homo sapien
MAVLEPEVLSVHTTWTTRGSNLKNRIPFGEERAGLQEKHPGGGRRSVICPKVRFQAGVQWHDLSSLEPLRPGLQRFSCLSLPSSWNYRHPPPCLANFCIFSRDGFSPCCPGWSQLLTSGDPPTLPSQSARITGVSHCT

SEQ ID NO: 612 - protein, 151 aa, Homo sapien [sequence omitted]

SEQ ID NO: 613 - protein, 38 aa, Homo sapien
MWRLGHSAPVPADCCPSSVPHHSPIIQICMAQTQTTYY

SEQ ID NO: 614 - protein, 38 aa, Homo sapien
FEKICCAVEQVLETGVESKERALFCFEDERYHSVLVYG

SEQ ID NO: 615 - protein, 20 aa, Homo sapien
MLASTQSNKESLHFWWESNG

SEQ ID NO: 616 - protein, 56 aa, Homo sapien
MSNIIPPIFNHHPSLVLKGMLQGGKEGRREAEVVEKDLKCYFLHAFFFLGGGRSGG

SEQ ID NO: 617 - protein, 38 aa, Homo sapien
MGWQGVGNCSSYGGRGNDTNNESLLVCILCSLNASSNL

SEQ ID NO: 618 - protein, 82 aa, Homo sapien [sequence omitted]

SEQ ID NO: 619 - protein, 85 aa, Homo sapien
MPKCLQLRNASISSLLLCHSVLGSVKVLTEGPSDLTLLYFMPIFQNPFLATAAHFCPWKWLEPCFPGRHSLWVFVLPLATPSGFI

SEQ ID NO: 620 - protein, 90 aa, Homo sapien
MGYHRKNSCRRSRLCCDLSLGVFPPSRQPEKMIKSPCNPVSPATNVPLLEPDSPTIQVRELSQQGQGTLACLLSPPYPGTHSVLPPSLFS

SEQ ID NO: 621 - protein, 44 aa, Homo sapien
MSHLCGWKSKKGNPREGGSHGEIDLHKYNQLILGKGTMAIQWRK

SEQ ID NO: 622 - protein, 75 aa, Homo sapien
MQLNINIFISLLNQGNAVVTNNPQNNTPAFPHSCYTSATYYLDGTVSISILCGLCGREKENETNQMMSLKASTRK

SEQ ID NO: 623 - protein, 38 aa, Homo sapien
MRQCTKASHSSETFKFSFLWYKQKGEGTYKNEGKLLVR

SEQ ID NO: 624 - protein, 93 aa, Homo sapien
MHTGSQPLSGVQLTGLPYTQEPATAPHPALTNPAPHLPHPVTPPSEPSTGSFVVLLSSRGSTPYSLSLNVPQFLESSTHCSALRVQSFQIPPV

SEQ ID NO: 625 - protein, 67 aa, Homo sapien
MQLCSQGCKPPDTTGAGALGNGNSNIDILVQDFIFLWVPGGGVRPPPLGCHGANRQADSGFHPCLAL

SEQ ID NO: 626 - protein, 40 aa, Homo sapien [sequence omitted]

SEQ ID NO: 627 - protein, 53 aa, Homo sapien
MKKEHTIYISRFFNIKSLYLITTVLKCLVLNLCTFHRPLINIFRIYSRGLHLD

SEQ ID NO: 628 - protein, 59 aa, Homo sapien [sequence omitted]

SEQ ID NO: 629 - protein, 20 aa, Homo sapien
MSLVYGRMRLSSLQSCVRLR

SEQ ID NO: 630 - protein, 44 aa, Homo sapien
MTMTKEKIFIFFRKFLCLKQFRKVNGGRVKFIIQNLFGASCPQV

SEQ ID NO: 631 - protein, 33 aa, Homo sapien
MKEENTPIKTETMVPRIKLHKKLHDPYNFFMLK

SEQ ID NO: 632 - protein, 537 aa, Homo sapien
MEKKECPEKSSSSEEELPRRDSGSSRNIDASKLIRLQGSRKLLVDNSIRELQYTKTGIFFQAEACVTNDTVYRELPCVSETLCDISHFFQEDDETEAEPLLFRAVPECQLSGGDIPSVSEEQESSEGQDSGDICSEENQIVSSYASKVCFEIEEDYKNRQFLGPEGNVDVELIDKSTNRYSVWFPTAGWYLWSATGLGFLVRDEVTVTIAFGSWSQHLALDLQHHEQWLVGGPLFDVTAEPEEAVAEIHLPHFISLQAGEVDVSWFLVAHFKNEGMVLEHPARVEPFYAVLESPSFSLMGILLRIASGTRLSIPITSNTLIYYHPHPEDIKFHLYLVPSDALLTKAIDDEEDRFHGVRLQTSPPMEPLNFGSSYIVSNSANLKVMPKELKLSYRSPGEIQHFSKFYAGQMKEPIQLEITEKRHGTLVWDTEVKPVDLQLVAASAPPPFSGAAFVKENHRQLQARMGDLKGVLDDLQDNEVLTENEKELVEQEKTRQSKNEALLSMVEKKGDLALDVLFRSISERDPYLVSYLRQQNL

SEQ ID NO: 633 - protein, 449 aa, Homo sapien
  MISC_FEATURE (38)..(38): X=any amino acid
QSAVIILLDLDTLVRSSIPFPEIQYSCRKIFLRSKDGXSLSPATLLIQIRIQRSWGPTSLALGFSECQSTSPAEPSPPLESGGGSTSPTANRGLVLSTVGWYLWSATGLGFLVRDEVTVTIAFGSWSQHLALDLQHHEQWLVGGPLFDVTAEPEEAVAEIHLPHFISLQAGEVDVSWFLVAHFKNEGMVLEHPARVEPFYAVLESPSFSLMGILLRIASGTRLSIPITSNTLIYYHPHPEDIKFHLYLVPSDALLTKAIDDEEDRFHGVRLQTSPPMEPLNFGSSYIVSNSANLKVMPKELKLSYRSPGEIQHFSKFYAGQMKEPIQLEITEKRHGTLVWDTEVKPVDLQLVAASAPPPFSGAAFVKENHRQLQARMGDLKGVLDDLQDNEVLTENEKELVEQEKTRQSKNEALLSMVEKKGDLALDVLFRSISERDPYLVSYLRQQNL

SEQ ID NO: 634 - protein, 117 aa, Homo sapien [sequence omitted]

SEQ ID NO: 635 - protein, 119 aa, Homo sapien
MRSLLANAWKDTWRASALSRSYRLSRSLSSIQHKSTWLTPITTLDTKAQMRTPRHTRLQLLAWSHPCDLQYQGWLRHTVDSSAFCRDGETHGGTDFEDADECTGVLSDTQIGSTGKHLP

SEQ ID NO: 636 - protein, 477 aa, Homo sapien
MGIPTSSVSEEQESSEGQDSGDICSEENQIVSSYASKVCFEIEEDYKNRQFLGPEGNVDVELIDKSTNRYSVWFPTAGWYLWSATGLGFLVRDEVTVTIAFGSWSQHLALDLQHHEQWLVGGPLFDVTAEPEEAVAEIHLPHFISLQAGEVDVSWFLVAHFKNEGMVLEHPARVEPFYAVLESPSFSLMGILLRIASGTRLSIPITSNTLIYYHPHPEDIKFHLYLVPSDALLTKTLFSEAEDTSVNKRGKNMTTKDITWNAIGKIYVHMIRTKQIKKVKKINPVAIDDEEDRFHGVRLQTSPPMEPLNFGSSYIVSNSANLKVMPKELKLSYRSPGEIQHFSKFYAGQMKEPIQLEITEKRHGTLVWDTEVKPVDLQLVAASAPPPFSGAAFVKENHRQLQARMGDLKGVLDDLQDNEVLTENEKELVEQEKTRQSKNEALLSMVEKKGDLALDVLFRSISERDPYLVSYLRQQNL

SEQ ID NO: 637 - protein, 366 aa, Homo sapien
MGIPTSSVSEEQESSEGQDSGDICSEENQIVSSYASKVCFEIEEDYKNRQFLGPEGNVDVELIDKSTNRYSVWFPTAGWYLWSATGLGFLVRDEVTVTIAFGSWSQHLALDLQHHEQWLVGGPLFDVTAEPEEAVAEIHLPHFISLQAGEVDVSWFLVAHFKNEGMVLEHPARVEPFYAVLESPSFSLMGILLRIASGTRLSIPITSNTLIYYHPHPEDIKFHLYLVPSDALLTKAIDDEEDRFHGVRLQTSPPMEPLNFGSSYIVSNSANLKVMPKELKLSYRSPGEIQHFSKFYAGQMKEPIQLEITEKRHGTLVWDTEVKPVDLQLVAASAPPPFSGVRMWPGCCPILPRTGCTCLCLNPWLP

SEQ ID NO: 638 - protein, 42 aa, Homo sapien
MSWVSASRNYTAQLLQRSEQSWSQRTRASSKVVKKAGVHRQK

SEQ ID NO: 639 - protein, 127 aa, Homo sapien [sequence omitted]

SEQ ID NO: 640 - protein, 122 aa, Homo sapien
MYMVNTLIILRATKCNREFLSHPWPPSPIEMTAGDCPSVPLRSRSPRLVLQFALRAGEVRGKSCGCDLEVGYSGEWYFAAVVERPQAVGFLQSWVYTHLSVMAGGDCCESILELVQKAAVCW

SEQ ID NO: 641 - protein, 74 aa, Homo sapien
MVPAAAGRGRPQEPDSKYPPGALRKTASSSSLERLNSTNLVLLDSYFILHLENRRLQGSSFRAVGFFETSFLVA

SEQ ID NO: 642 - protein, 120 aa, Homo sapien
MVNTLIILRATKCNREFLSHPWPPSPIEMTAGDCPSVPLRSRSPRLVLQFALRAGEVRGKSCGCDLEVGYSGEWYFAAVVERPQAVGFLQSWVYTHLSVMAGGDCCESILELVQKAAVCW

SEQ ID NO: 643 - protein, 365 aa, Homo sapien
MVKWAWGRFCSQSGLCSVERERRAEFLKEYMYQFWWRWTKFWVSLIFDLRRELVRVESVAGTRGPRRPLVQLTRCPSSRPSVKRYVRKGVPLEHRARVWMVLSGAQAQMDQNPGYYHQLLQGERNPRLEDAIRTDLNRTFPDNVKFRKTTDPCLQRTLYNVLLAYGHHNQGVGYCQGMNFIAGYLILITNNEEESFWLLDALVGRILPDYYSPAMLGLKTDQEVLGELVRAKLPAVGALMERLGVLWTLLVSRWFICLFVDILPVETVLRIWDCLFNEGSKIIFRVALTLIKQHQELILEATSVPDICDKFKQITKGSFVMECHTFMQVCGAARGSVPSQGAPPHLQPGGCSDHPEGAQDGHQWA

SEQ ID NO: 644 - protein, 180 aa, Homo sapien
MNFIAGYLILITNNEEESFWLLDALVGRILPDYYSPAMLGLKTDQEVLGELVRAKLPAVGALMERLGVLWTLLVSRWFICLFVDILPVETVLRIWDCLFNEGSKIIFRVALTLIKQHQELILEATSVPDICDKFKQITKGSFVMECHTFMQKIFSEPGSLSMATVAKLRESCRARLLAQG

SEQ ID NO: 645 - protein, 143 aa, Homo sapien
MQPAERSRVPRIDPYGFERPEDFDDAAYEKFFSSYLVTLTRRAIKWSRLLQGGGVPRSRTVKRYVRKGVPLEHRARVWMVLSGAQAQMDQNPGYYHQLLQGERNPRLEDAIRTGEAVGVELWCRARGPEGTGFHPVSSLSVQG

SEQ ID NO: 646 - protein, 164 aa, Homo sapien [sequence omitted]

SEQ ID NO: 647 - protein, 69 aa, Homo sapien
MIFIFHKILFSFSLFLPFKNTEMENIGTGFPESPESHGLKSQQPHPVKESHPGARQGQTRSAVLAHRAP

SEQ ID NO: 648 - protein, 47 aa, Homo sapien
MSSLGPAAPAASALRLLTAQARRSYKAKSFVIFLWQIVLKSPSPLLF

SEQ ID NO: 649 - protein, 76 aa, Homo sapien [sequence omitted]

SEQ ID NO: 650 - protein, 70 aa, Homo sapien [sequence omitted]

SEQ ID NO: 651 - protein, 79 aa, Homo sapien [sequence omitted]

SEQ ID NO: 652 - protein, 42 aa, Homo sapien
MGPKDNIFFQWLRRVDRERPSAARTLIRKQPCQVLRPPQPPH

SEQ ID NO: 653 - protein, 102 aa, Homo sapien
MVSSAQMGFNLQALLEQLSQDELSKFKYLITTFSLAHELQKIPHKEVDKADGKQLVEILTTHCDSYWVEMASLQVFEKMHRMDLSERAKDEVREASKPLKTL

SEQ ID NO: 654 - protein, 413 aa, Homo sapien
PPPHCPLQPLRYFAHYPSPLASLICALSFPEPGSAYYCCAPWGAPSLPDPLLQNEVTSPPSSFNLQASLACPAQLGPVTICKAEQQPLGLRPLWLLVRLPVVGRGSVRAGLVIPSGVQRKRKDQCFFVSFVIFGWVGGKGLVSCSATTQQWADLSLALEVNQSLTCVNLSDNELLDEGAKLLYTTLRHPKCFLQRLSLENCHLTEANCKDLAAVLVVSRELTHLCLAKNPIGNTGVKFLCEGLRYPECKLQTLVLWNCDITSDGCCDLTKLLQEKSSLLCLDLGLNHIGVKGMKFLCEALRKPLCNLRCLWLWGCSIPPFSCEDLCSALSCNQSLVTLDLGQNPLGSSGVKMLFETLTCSSGTLRTLRLKIDDFNDELNKLLEEIEEKNPQLIIDTEKHHPWAERPSSHDFMI

SEQ ID NO: 655 - protein, 555 aa, Homo sapien
MVSSAQMGFNLQALLEQLSQDELSKFKYLITTFSLAHELQKIPHKEVDKADGKQLVEILTTHCDSYWVEMASLQVFEKMHRMDLSERAKDEVREAALKSFNKRKPLSLGITRKERPPLDVDEMLERFKTEAQAFTETKGNVICLGKEVFKGKKPDKDNRCRYILKTKFREMWKSWPGDSKEVQVMAERYKMLIPFSNPRVLPGPFSYTVVLYGPAGLGKTTLAQKLMLDWAEDNLIHKFKYAFYLSCRELSRLGPCSFAELVFRDWPELQDDIPHILAQARKILFVIDGFDELGAAPGALIEDICGDWEKKKPVPVLLGSLLNRVMLPKAALLVTTRPRALRDLRILAEEPIYIRVEGFLEEDRRAYFLRHFGDEDQAMRAFELMRSNAALFQLGSAPAVCWIVCTTLKLQMEKGEDPVPTCLTRTGLFLRFLCSRFPQGAQLRGALRTLSLLAAQGLWAQTSVLHREDLERLGVQESDLRLFLDGDILRQDRVSKAEAYHIRSRVFHGRSNLGNEGERVLGAPGMGVRSVGKMESSKRETGAKRRGPGGRKSGG

SEQ ID NO: 656 - protein, 85 aa, Homo sapien
MGGGLPAGLEVRGAVNLDVSARGQHLTPGFFLLIFRRWLQHHLLPEPVLSRSAQDPVDVPFLALPSLFWESVQEGAMGEQKGSGC

SEQ ID NO: 657 - protein, 59 aa, Homo sapien [sequence omitted]

SEQ ID NO: 658 - protein, 40 aa, Homo sapien [sequence omitted]

SEQ ID NO: 659 - protein, 38 aa, Homo sapien
MPREALCQIYKSSSKFRFLLCPNSALTALSLKPKGKNK

SEQ ID NO: 660 - protein, 168 aa, Homo sapien [sequence omitted]

SEQ ID NO: 661 - protein, 63 aa, Homo sapien [sequence omitted]

SEQ ID NO: 662 - protein, 71 aa, Homo sapien [sequence omitted]

SEQ ID NO: 663 - protein, 107 aa, Homo sapien [sequence omitted]

SEQ ID NO: 664 - protein, 126 aa, Homo sapien [sequence omitted]

SEQ ID NO: 665 - protein, 43 aa, Homo sapien
MNCVVCSLHTLTYSIVLPDIVIHSHVLHNNILVTMNHISSDSS

SEQ ID NO: 666 - protein, 23 aa, Homo sapien
MKITFSACLAVLQAGENMLYLCD

1. An isolated nucleic acid molecule comprising:
(a) a nucleic acid molecule comprising a nucleic acid sequence that encodes an amino acid sequence of SEQ ID NO: 473-666;
(b) a nucleic acid molecule comprising a nucleic acid sequence of SEQ ID NO: 1-472;
(c) a nucleic acid molecule that selectively hybridizes to the nucleic acid molecule of (a) or (b); or
(d) a nucleic acid molecule having at least 95% sequence identity to the nucleic acid molecule of (a) or (b).

2. The nucleic acid molecule according to claim 1, wherein the nucleic acid molecule is a cDNA.

3. The nucleic acid molecule according to claim 1, wherein the nucleic acid molecule is genomic DNA.

4. The nucleic acid molecule according to claim 1, wherein the nucleic acid molecule is an RNA.

5. The nucleic acid molecule according to claim 1, wherein the nucleic acid molecule is a mammalian nucleic acid molecule.

6. The nucleic acid molecule according to claim 5, wherein the nucleic acid molecule is a human nucleic acid molecule.

7. A method for determining the presence of a endometrial specific nucleic acid (ESNA) in a sample, comprising the steps of:
(a) contacting the sample with the nucleic acid molecule of SEQ ID NO: 1-472 under conditions in which the nucleic acid molecule will selectively hybridize to a endometrial specific nucleic acid; and
(b) detecting hybridization of the nucleic acid molecule to a ESNA in the sample, wherein the detection of the hybridization indicates the presence of a ESNA in the sample.

8. A vector comprising the nucleic acid molecule of claim 1.

9. A host cell comprising the vector according to claim 8.

10. A method for producing a polypeptide encoded by the nucleic acid molecule according to claim 1, comprising the steps of:
(a) providing a host cell comprising the nucleic acid molecule operably linked to one or more expression control sequences, and
(b) incubating the host cell under conditions in which the polypeptide is produced.

11. A polypeptide encoded by the nucleic acid molecule according to claim 1.

12. An isolated polypeptide selected from the group consisting of:
(a) a polypeptide comprising an amino acid sequence with at least 95% sequence identity to of SEQ ID NO: 473-666; or
(b) a polypeptide comprising an amino acid sequence encoded by a nucleic acid molecule having at least 95% sequence identity to a nucleic acid molecule comprising a nucleic acid sequence of SEQ ID NO: 1-472.

13. An antibody or fragment thereof that specifically binds to:
(a) a polypeptide comprising an amino acid sequence with at least 95% sequence identity to of SEQ ID NO: 473-666; or
(b) a polypeptide comprising an amino acid sequence encoded by a nucleic acid molecule having at least 95% sequence identity to a nucleic acid molecule comprising a nucleic acid sequence of SEQ ID NO: 1-472.

14. A method for determining the presence of a endometrial specific protein in a sample, comprising the steps of:
(a) contacting the sample with a suitable reagent under conditions in which the reagent will selectively interact with the endometrial specific protein comprising an amino acid sequence with at least 95% sequence identity to of SEQ ID NO: 473-666; and
(b) detecting the interaction of the reagent with a endometrial specific protein in the sample, wherein the detection of binding indicates the presence of a endometrial specific protein in the sample.

15. A method for diagnosing or monitoring the presence and metastases of endometrial cancer in a patient, comprising the steps of:
(a) determining an amount of:
(i) a nucleic acid molecule comprising a nucleic acid sequence that encodes an amino acid sequence of SEQ ID NO: 473-666;
(ii) a nucleic acid molecule comprising a nucleic acid sequence of SEQ ID NO: 1-472;
(iii) a nucleic acid molecule that selectively hybridizes to the nucleic acid molecule of (i) or (ii);
(iv) a nucleic acid molecule having at least 95% sequence identity to the nucleic acid molecule of (i) or (ii);
(v) a polypeptide comprising an amino acid sequence with at least 95% sequence identity to of SEQ ID NO: 473-666; or
(vi) a polypeptide comprising an amino acid sequence encoded by a nucleic acid molecule having at least 95% sequence identity to a nucleic acid molecule comprising a nucleic acid sequence of SEQ ID NO: 1-472 and;
(b) comparing the amount of the determined nucleic acid molecule or the polypeptide in the sample of the patient to the amount of the endometrial specific marker in a normal control; wherein a difference in the amount of the nucleic acid molecule or the polypeptide in the sample compared to the amount of the nucleic acid molecule or the polypeptide in the normal control is associated with the presence of endometrial cancer.

16. A kit for detecting a risk of cancer or presence of cancer in a patient, said kit comprising a means for determining the presence of:
(a) a nucleic acid molecule comprising a nucleic acid sequence that encodes an amino acid sequence of SEQ ID NO: 473-666;
(b) a nucleic acid molecule comprising a nucleic acid sequence of SEQ ID NO: 1-472;
(c) a nucleic acid molecule that selectively hybridizes to the nucleic acid molecule of (a) or (b); or
(d) a nucleic acid molecule having at least 95% sequence identity to the nucleic acid molecule of (a) or (b); or
(e) a polypeptide comprising an amino acid sequence with at least 95% sequence identity to of SEQ ID NO: 473-666; or
(f) a polypeptide comprising an amino acid sequence encoded by a nucleic acid molecule having at least 95% sequence identity to a nucleic acid molecule comprising a nucleic acid sequence of SEQ ID NO: 1-472.

17. A method of treating a patient with endometrial cancer, comprising the step of administering a composition consisting of:
(a) a nucleic acid molecule comprising a nucleic acid sequence that encodes an amino acid sequence of SEQ ID NO: 473-666;
(b) a nucleic acid molecule comprising a nucleic acid sequence of SEQ ID NO: 1-472;
(c) a nucleic acid molecule that selectively hybridizes to the nucleic acid molecule of (a) or (b);
(d) a nucleic acid molecule having at least 95% sequence identity to the nucleic acid molecule of (a) or (b);
(e) a polypeptide comprising an amino acid sequence with at least 95% sequence identity to of SEQ ID NO: 473-666; or
(f) a polypeptide comprising an amino acid sequence encoded by a nucleic acid molecule having at least 95% sequence identity to a nucleic acid molecule comprising a nucleic acid sequence of SEQ ID NO: 1-472;
to a patient in need thereof, wherein said administration induces an immune response against the endometrial cancer cell expressing the nucleic acid molecule or polypeptide.

18. A vaccine comprising the polypeptide or the nucleic acid encoding the polypeptide of claim 12.
